United States Patent Application Publication US 2016/0230186 A1 - sequence listing, part 8

SEQ ID NO: 14755 - DNA, 431 bp, Diabrotica virgifera
aggagccctgagttttgacgaacaaatatcatcaggttctcataagtctattcgtgaacagattcctgcaaatcctagaaattggtttaagtcagcaatttcgtgtataatgtggtgacttggtctaccagaaggatgttagagaaggtattttccaatcagtaacactaagagcgcctgagagtggcgaatacgaaagaaatattagctgcgttatggctttagattttggagcgagcaatacaatgccacgtttctcagaaggtggacgcgattctcgttatgtggttataaatttaagacctgatctgatggaaagcctaaactacagcgtgaaagtttatatagaaagagctcatgcaagaaaattcagattgtaattttaacaataaatacgttgtttttcttgttttagaaataaatatttagct

SEQ ID NO: 14756 - DNA, 432 bp, Diabrotica virgifera
gccatcactataaatttctcagagttccctctagaacagttaggtatttatatctttacaatgatgttgtgtggtagcgaacgtcttaaaaaggaatcttattgcagaagaacctaagattatagagatgtttgtaaatacaactgataatatttctgaatctcagttattaatgctttcagatttgcaattatctaacttaaaactaaaaaacactttttaattgttcttttttgcttgaacgttagatgctaaccaaaacaaaaaaaaatatacaaaattcatgtgtaatttataaacatagttacgatagctagataatctttaaagatcttacgaaaactattttgattattcgacgtttattgaatggaccaaacaaattttaaaaccatttggaccctttgtaaagtaagagtgtctacctgggcc

SEQ ID NO: 14757 - DNA, 431 bp, Diabrotica virgifera
gtaaggttaaggtcaatattttcaaatttttaaaaaatcgtcatcacttttaaattgcacaatatacgcaaatttaaattaatgcctattctaacatgctcttataataaacttaatcatattacaatcttaacaataacgaattaaagacgttttagttcgatatgttcaaatgaaagcaaccaatatgctgcaaggtaaattgagacctattttaaaatattctttgatcaccagcatcattggtggtacggccttaagtttaaaaacgaatcagtaccacttagactcaataggcattgttagattaagtagggcagcttatacggtcctccaaataggagtaatctacaaaagagacctatatggaagaaaactagacccctcatcccaagaatacaaagaaaccaagtccagttgtcacaagcgaa

SEQ ID NO: 14758 - DNA, 429 bp, Diabrotica virgifera
aaaattcaagacaaaccagaaataaaaatcagaacagaagatgaaaactaaggcattatttttttgtttttgcatcattgcaatcagccaagtatttggtgatgaagatcttccagagattaaagtaactaatgaagatccagaagctcaagctgcaagaccttttagagaagaagattgtaacctaggtgtagaaactggattccgttgtcgtgccaggaagccagtgtatagatggagcagcgaggacaataaatgtgtcaaagactactatggaggctgtcatgctaccaaaaacaacttcagatctaaagatgactgtgtcaagaccgccaccccagtttgctctagctaattttagattaatcaaaaacatgcatttataaaaaatataaaacatattttatgaaaataataaataaatttaat

SEQ ID NO: 14759 - DNA, 430 bp, Diabrotica virgifera
attttataggaaatactagttaggtgccactgatcttaaatggagagttcttcagggatatcatttgacaagcacgttctacgatggtacttcgtttgctgttgttttctaattttgaagatgtcgtttatgtcgattttcacggcagtaaaaagagttatacacaaggcgtttgcaaatcccgaagattcaaaacaaatgaaagtagatccacaagtaaatgaaaatgtggagagggtaagaagggcacatttaaatgacctggaaaacatcccactctttttcgtcgctgggttaatatacacttttgccaatcctggagcagcaggagccaaggcgatatttgtaatatatgtagtcacgagatatttacatactttcgtatacacagttgttcctcttcctcaaccagctagagctctatcgtgga

SEQ ID NO: 14760 - DNA, 428 bp, Diabrotica virgifera
gaattggcccttaaaatttttcatacttatttgctaacaccctgtataaaggttctacaaaattcattataaacaaatatttcataaaaaaaaataatttaagaagaattcaaaatttttttactacaatttgtattttatcctttatgttttgttgtcaacaatgtgttatgcatacttttaatgtaattttttatagtagtaaaataatacacatctccaagaaattaacgcaccaccttaaaaataggtcatttttaatgtctcgaatttcctaaaccagttgtccgatttaagtgatcttttaatgtgttgtagccttgttccttggcaatatggctgtaataatgttgttgctggacaggtggattgttattgtatgtcgagtgtactaatcaaactctgtttttttctcaaaattcgcatca

SEQ ID NO: 14761 - DNA, 430 bp, Diabrotica virgifera
cgaataatcatcgtcatagttgtcaactcattctcaccttatatcgcgacagaaattttagataaaattatattacctccttgttggtgtttatttttatcagccagcagttgcactggagtcttcgcaaggatttctctcgataccaaagtgcgtaaatgtaaacgaaaatgaaatttttagtgaaagtgatggacctcatcatcctccagttcttatggattggttatgtcatttacaggagtgtttgcccggagaaaaagctgtaccactctatccaagatgaccgcagtttatcacaagacgaaaccaaaaacaaacgccacttcattcacctgtatacaacgacctcgatgaacggaaaacctgtgtgttacatggacgtctaccagatatactcagcttcagatgaagaacatctaagaagcgt

SEQ ID NO: 14762 - DNA, 427 bp, Diabrotica virgifera
cacaaacagaaacacacagtctcgcgttcaatatttacgtcttccgcaaaaaatctaaaacgatattaattttgaaaaatttttatctatttttcacaaacttttcgcattaccaccagtaaagtgctttcaccttgtatatgggtatctatacttatcaagtatcatcaaattagccaatttaatcgtaatttgataatatattgataatacactctatataaataaatacatagaaattgcagtttatgctgactgtcgtatagataattttaccggcgcgcgtggatgttaagaaaatggtagctaccgtaaaagtggaagaaggattggtcgagggtacgacaaggaccagtactaacggcattccttttcattcgttcacatgtataccatacggaaaagcaccaaagggcgatttacgctt

SEQ ID NO: 14763 - DNA, 430 bp, Diabrotica virgifera
gcctggtagaggtattaggattttcttgaacagatagtagtacattcattttgatatcttcactaagagcagtttgtcgaggagtactggtttttcttacatgcccgttttccctaaattgtctttctattttacttgcagtactttgcgatatcggtggcagatcgggatatttttctctaaacagatgcgtaacttccatttgtgttcttgctctatctccatatccaagcatttgtaaaatttcagtcttgtgctttttcagttaaataaatcatatttaacaatttctccaaacgaactgacttgctaataatcgatatttttaaacgtcaaaatatttgacaacttgctaaaaaccataccaacacaaccttttgtttaataatatctagattgctggatttttctttaaaatgattatgaatac

SEQ ID NO: 14764 - DNA, 431 bp, Diabrotica virgifera
ttttctagtgataataaacgaatacaaattgttagaattcattagttattcttttataatgtcatttatagttcaacaaaatattttttgtcgttaataaagatttattgacataatttgcgatagtgagttatataggacataccgtatccgtactttttggagtcaattcggatttatcagagctaaaaagtgtatgtaatatgtacaaaacttataaaaacgtaaataatattattatatcatgtgtatattgccacatcctttgtatatatagaaaagttaacctcacttcatccttataacagcgttaattaattttattctttgatctattttttttttgggaacgaggaaaataaaagtatttcacatcactagttttccatgtatttttacagtgaacaacacaacaaataacgtgatatggc

SEQ ID NO: 14765 - DNA, 430 bp, Diabrotica virgifera
cagaattttaacatttattttgttttcttaactagatgtgcatattacaattttacccttatttacattgttcatgttttttgcagaattctagaggtgtatgacgttttagctcttcgtagactttgtcaagatttggtagcaattctctttcgcaagcttctctcaattgttcgggcaaatcacggcacaatttctctgcttcatgtctaacttcatccagtggaatacgctcatcagcgtagcccttaattatatctgccaaagttacgcaagtgtcgcacctaagttcatcaggaatcggtccacgggtaggttcagggcgaggaccaggcccaagtgtaggctcatgttgagcgtaaacggtgagagcaacgcagctcaaaagtgccaaaactagtgcagttttcatgtttgggaattatgtttc

SEQ ID NO: 14766 - DNA, 429 bp, Diabrotica virgifera
gttattacagtacaaacaagataaacgttttcggttgttcaaaatgttcgtaacgcaccatttttctatcgacgaggtgaataatttacttagtgagagtttcgttaggatttttggaaatgtggttgaacactttcccgctgctgcaattggaattttaaaatgcaggccttttaacaacagcaatgccttgattcaagcgatttgtgacttcttggatggcttaaaagcacatgaaaaagaaaagatttttcaactgtaccccgacatcttagacagcgccctatgcacatcccccatgatatacgacaaagaaccatcatttgttaacatcgaagaaaagaggaagcttcaggagctaaacagtcgctataaagacaaattcggctaccctttcatcaccaccatcagcgatcacaccatctctac

SEQ ID NO: 14767 - DNA, 428 bp, Diabrotica virgifera
ctgtacacatccatattaattttattccataaatcgcttgatattttcgagacaataactttaaaaaatcaaaatgcatcagcaacgaaaaaattttctcacgataagtaccaactcacagaaaaaatgattggatgtatacttggaaaatcaataggacaaactcttctatccgtgaaaaaacacacacgaattattttcaaattgacatgaacaatttaatttggaaaattttatgaataattcatatttcccacaagtataattaataaattcaatttaataaaatcaccaggcatgcatttttttttatttaatagttgttaaaattcatatttgttataattattgcagtaaagttattttatagtattttctaaatctgtaactcgttctttcaagtcagaagaaaagaaatcatctgaaat

SEQ ID NO: 14768 - DNA, 437 bp, Diabrotica virgifera
actgactaagtgcataatatgtattgaatacctccgataagataacatattgtacctcaataaatcggaaaaacattgttcagttgaaattagttgctctgaaatagttttgcagcaaacagttttaagttatttaaaccaactttagtaaaaaaaatgtcacatcacggaccccctcaccgtaggagcccatccccacctccacctcaccaccatgggcctggacatgaccatcatgatcatggaccaccacaccatcatgatcaaggacctcatcaccatgaccatggacaccacggtagaccaccgccaccgggaccacctgctcgagaatatcctcctggacaatatcctcctggacatcaccatcctcccagataatagtttattcaggtaaaaggaggctaatcattattacattgtaaatcgcttatttt

SEQ ID NO: 14769 - DNA, 429 bp, Diabrotica virgifera
gtagtagtgcatgtatttcggcatagaaaagcgcgtgttgtttccttttgatttaaataaaaatgggtggaaaatatacaaaattagatcctatggaagttgaagttcccgaaatagatgcgttactgaacagagatggttatttgaggccctacgaaagagaaattagaagaagatatgcctgctttaaagatatagaagagaacattgaacaaaatggaggaggtttagataaatttacacagggatataagtattatggaattaatgtccaacaggataatacaattatatgtagggaatgggcaccaggagcacaacaattgttttaactggggattttaatggttggaatagagatagtcacccatacaaaaattagaatatggaaaatgggagttaatattgccacccaatcaagatggttca

SEQ ID NO: 14770 - DNA, 421 bp, Diabrotica virgifera
cagggatttagaaaagggagatcaacaattgatgcaatccacgttttaacgcaaacaatcgaaaaaagttacgaacatggcatagaattgcacatattgtttattgatttccagcaggctttcgacagcatctacagaaaacagctattaacagaaatgaaaaatatgaatatacctgcaaattaataagattgaccagaatgacaatgaaggactcaacagcaaaggtcaaaacagtggatggtgaaacgaagaatatcaacatagaacatggggtaagacaaggtgacagcctgtcgacaacgctctttaatatagccttggagggagtaattagaaacacagggctaacaaaaaagacaataatccaaagttctacacaaataatagggtatgcagacgacctagggttgatagcccg

SEQ ID NO: 14771 - DNA, 428 bp, Diabrotica virgifera
gcatacagttctccatcgtcgtctgttccattttgtaattgtttatctagtgctggcactaaaattccggaaaacgataacgataaaccaactgccatgtgaagactggccgccaatattgctgccagaacctgtggtaatagtgtcttgagtgtctttccatcgtacctgctaagagatttacaactaacaatgatttcttgaaattttgcatcttgcttttgttcttcttttatggcctttctattttcctggatgtttaagctgaagcaactggcacttatatccattttggctaaagtctttttactctatcacagtttgcaaaaaaccaaactcgagggttggaatataccacttccaaatcctactgtttcatacacaatcagaacaatatcatcacaaacatgagcactgtatatctaacc

SEQ ID NO: 14772 - DNA, 427 bp, Diabrotica virgifera
gtctttcctaaaagtatctgattttttgtaagttaataaatgtatgtagaggtgaactttaaaaaaagaagacaagaagtctttaaaacttaacggtaatttcttaaatacaactatcacatcctcgttactctaaatgtgtatcctggttaatacaataattgtactttttaagattttgttaccgatgtcatatgtacagtacgtaaatcgttcagctggacatagggaacatacactgtacatatttagattcataaatacatacattgtattatattgagataattgtggcaactgagctctctcgatgacaatatggttgttagcattaaggggcattaacctcaaaatttacaactctgacataaataaacgtccaaatattacaatgtagtagctaaatatttttggtctagggaatggg

SEQ ID NO: 14773 - DNA, 414 bp, Diabrotica virgifera
aattattaacaacttggtgaaaaaacgcgattttgcgatattttgcacctcattaaaaagctaaatagttgaaataaaattacaaaatttgattttttcgaaacattgaaaaagcttcaaaatgccgatttttgaaagttaaaaagtcaatttgttgtctcccaaaccgcaaaataagtgaaagtcgtcatttgttaataagttcattaaaactaacgtagaactctggtgctttcacccaaatttgggtattgggccactcaacaaacccctaaaatttgagacccatccattagttagtttaaaagtcattctatttgtttatcccaaagacctttgttttgcaacaacataagacagaaaataataaagatagggcaactccgcgcatgccaaatgaaagcagaagagtta

SEQ ID NO: 14774 - DNA, 426 bp, Diabrotica virgifera
gtgatttattattagagtacaaagcggaagtcgtggaagaagatcttactgatgacgatccagaggacaaccgaacgtctcaagtacctctggatatcgaagatgattctacatctgtaaaaagcaacgaagttgataataaagttcctgaacccgtccaaccatctccaataccagcacaacctgaaacagctacccagaaagaaaaggaagcaaagaaaccaacaactgcggaagaagatcggcctaaagcagctactccagctgttgtggcagcaacacaaaatgagaaaaaacaagttgacaaaaaagaagacaaccaaagaaaaccatcgcgcgacaagggtaaagctccaccacctccaccgcttcaaactcaacagtccaccagctcaacctcatcggataaaagctcacctcttcccg

SEQ ID NO: 14775 - DNA, 424 bp, Diabrotica virgifera
  SmartBlast Evalue=6E-24; Info=Endocuticle structural glycoprotein SgAbd-8 n=1 Tax=Camponotus floridanus RepID=E2A4L4_ 9HYME
accgtggtatccattgttgccgtttgaaccttcttggttatattcttctctataggaaccttcattgtattctccacgagcttcagcagctttattctcttcaattgatttcaagatcgcttcgggaatttcaggaacatgagatccttttggtacaaaaccgttttcgtcagcagtgtattcaagagatatctgttcaccttctggagaagtataagagaatccaccatgtgcagatttaccttcgttttgaacgaaaccttcttcttgggcagaaattccattttcagtttcgtatgaatagctgtagtgtccatctccgagatcaggattaaattcagatctgattaaaccgattggggcggattgaggaccagaaaattgaccattgtattgtccttgtccggattgttgtattgaaacc

SEQ ID NO: 14776 - DNA, 428 bp, Diabrotica virgifera
  SmartBlast Evalue=1E-34; Info=Disks large-associated protein 1 n=1 Tax=Camponotus floridanus RepID=E1ZXS3_9HYME
ttgttttgataattaaagtgtgcaatttgttgacttatttagacatgccgtcgtcgttaaacgtattggaaaaagacggtcattattttataaaaatactcgaagatcaaaataaaagacttttggaattagccgccagggttgaagatgatatatcaactcctgatttatcagaagaagttataggaaaacttagatctgcttcaggaaaagcaagattgttagtatcacagaaaatgcaacagtttaagggattgtgcaccaacaatattaatcagactggtggtgaagaattccctactacaaacgaagatctgcagggcttctgggacatggtaatgcttcaagtggaccaagtagatgccatctttaaggaaatcgaagaactaaaagcgaataactggaaggaaccggtcaaggcggcacct

SEQ ID NO: 14777 - DNA, 414 bp, Diabrotica virgifera
gttagatcacaacagaacgttttctgattaaaaaatccatcatcagcgttccaaaaaaccaagaatgttcatgcctgagccaccaaaatgctttgggtacaaacgcaaatgttaaagtttaaaaatgaagttaaagagaaaaagttaaaaagaatttaatacatattgttaaaactttgtgatgttgcaaatattcctggatagtgatgtgagtcgagaatatttccaagcgaatattcgccaacatcggaaaagtttccgagaatattcgcctataaaaaaatggaaatattctcctgactgcgaaggttcccggaaactttcaatggaaaattcttgagaatatttccgagaactctccataatatttccgagaactttccataatatttcagagaacttttggacataaga

SEQ ID NO: 14778 - DNA, 428 bp, Diabrotica virgifera
  SmartBlast Evalue=6E-37; Info=Cytochrome P450 6BQ10 n=1 Tax= Tribolium castaneum RepID=D2A097_TRICA
ctctgtgaatggaaaatacgggaatacttaaggttacgccgggttctataactaaatcactacctggaatattgtatcgtttggtgcagattcttggcaacacaccaacgggaggatgtatccgcaaagtctccaaaataactttttccaagtactccatttccattaaacactcaaaagtcagtttgttgtcatgcttaacaagaaccctatttacttcttctctcaccttctcttgaatatcttgacgttgcgctagttccagtaaagcaaatgacattgtagttgctgacgtttcaaatcctgctgcaaagaatacaaaagcttgtgcagttatctggttcaacgtcaaggctccaacatttgctttattcttttgaaccagatttcggtcatcatcagctccgacctttccaatattctttagt

SEQ ID NO: 14779 - DNA, 425 bp, Diabrotica virgifera
aaggatcgatgttggttgtaggttgtgttataaatgtataagtaaaagccaacagcgcaaaaaaggcacaacaagtgaacaatgtgtttaatttgcgacgttagtattttcattttttagtttgtgtctatttagatttgttatcagcacaaatatacttcattttcattaccaaactttttaacgaagaaatttaaataaatatgttaatattccgaactaaaatcaaaaactgataactattttaaatagtaattttaatttagagataacatgcgtaaaaatacgttttatagttcaataaaaataaaacaatagtatcacacgaaataatttaaaaaacgattttacaatattaggcaacgtttagtttttcactttatcgatacatcatttggcagatcttttatgtattttaaacctat

SEQ ID NO: 14780 - DNA, 426 bp, Diabrotica virgifera
  SmartBlast Evalue=0.000000009; Info=Multidrug resistance- associated protein 7 n=1 Tax=Harpegnathos saltator RepID=E2BGH7_ 9HYME
cttttactaattaattattaactaataataataagtattgaggtaataatgtgacacatagtagttataactgaaattaagaaacaaagaaaagccattgcttgggacttccagctacctgcagatggtgccagatgatttaaaatgacaagtgatgtcataggccgtaattggaactggaccagcctctgtggtcccgaagggttccaaatatggtcacagcaaagacacgattttggccagtgcttccagcaactatgtttccagatccctgtactttccctttttgcagtactatcttcatattactttgggcgtcaaactggttttgtttctcgaggaaagcttcaaagtactgtatcataaccagaaatgtagtaagtctcctactgatgttctatccaataatgcacgcatacaatacta

SEQ ID NO: 14781 - DNA, 427 bp, Diabrotica virgifera
ctagtctataaaactgtgtatgttttattacgaaaccattttatagtattgttaaaacattttttgacgttagttccaataaaatctccattattcaataattgtgaagttagctttagctttttacacctttttatacgatttatacttttttatacccatttgtgcacaattttcgtcagttccataagtttttatttttttatataaaaaacctcatgatgcattcagtattcatgtagcagcagctaacaaaatgattttaaatctgtcaataattaacaacgataatatataatgtatattttttaatgtattattaatttggcaataggatgttgaagttccttggcaaaaggatgaacaaaaagtcgatcaatatttttcttgacttatgaagtcgtaagtcagaacgttacttggacaa

SEQ ID NO: 14782 - DNA, 427 bp, Diabrotica virgifera
  SmartBlast Evalue=3E-37; Info=Wd-repeat protein n=1 Tax=Aedes aegypti RepID=Q16KW1_AEDAE
tgaaccgaagatgcccaaaggaaattattgtgcagtgggatcaatgtcacctgttatagaggtctgggatgtagatattatgaatgttattgaaccttcatttactttagggagacctgctagtaaaaagaagaacaaggaacatataggccatacggatgcagtgctttcattagcttggaacaaaacctttgaacatgtgttggctagtggatctgtagatcaaacaatacacttgtgggatatggaaatcaaaaaaccaagtacaaccattaaatccttccaagaaaaagttcaatgtctcgaatggcatcctttagaggcacaaacacttttaggtggaggttgtgacaaatctgcaagagtatttgatggcaggacccctgaaacccaccaaacttggctacttgatggagaagctgaaagg

SEQ ID NO: 14783 - DNA, 428 bp, Diabrotica virgifera
tcggtcgtttttaaagtaaagtaaaataccaaatatcgaaggcaaaacaaataaagaatttattttttcattatgctgtagttcctaacgacatcgtaaccaaacatgtcaccaaggaaacggtctcagagtgctctcaaggtagcaatgttccatggcgttcttaattagatctaatgagttaaaaataaatattggagcagccttcccatatgaaaaatgtcgaatttaaaacaacgtagaaatagattcctagaacttttttgtacaactgtatgctcgacctaaatagtaaagatatgtactcttttggtaggtaaattatatctgtccttttatattaaccatcatccataacgaatttatttaataattaatagtataaaactgtaggtagtatattgaattccaactgtagaggtgtaact

SEQ ID NO: 14784 - DNA, 426 bp, Diabrotica virgifera
tagaccttcccaacacgtgggatgtaaattgagttggttacattacaatattttgatggcaaacaaatggtttttaaaatgtatattagagttgatatcttttactacactcggggccggttgttcgaacgctaatcaaaaatgatcattgtcaaatatttgattgctctcacagctgtcaatgtaaactttgattgggttgctgaaaacataattatttattacaattttgaaattagttggtcaattatgttaataattattgttatgttaattgattgactaatctcataattgtaatcaattatgttttcggcaacccaaccaaggttggcattgacagttggtgacagtaattgatattttatagtgatcattgttgattggcgttcgaacaaccggccctaaatttattattatttgagt

SEQ ID NO: 14785 - DNA, 425 bp, Diabrotica virgifera
taaaaatggacaattctttgggatgttaaagtttatcaatctaaaatcttgtacttttaaattttaaactttcagtttagtctctttcgtataccattctttcctctacgaaagatgcagctgtatttacaaactgactctattttataatcaacaaaaaacgacataaactatttttctttgatcaacaagtctggaaaacaaatctatacttacctttaatatattttccaaaatgaatcaaaataaaattattaagtattcaccaaaaatgatgcccagcatttttaatcagtgccatccaattgccaatacaactgaactggaagaagtcttacaggaaccacctgcttggatttcgagggtgcaacctctacaacctagatcatgtactgtagccaaaaaattcaaagaagattgccatt

SEQ ID NO: 14786 - DNA, 427 bp, Diabrotica virgifera
agttgtattgtccaagtaaaaaatactgtggaatagctttaagccggtgaaatatgatattcttcaaatatagatattaggtcaaacgtttaagaagcggccctttgaagcatctgtgtttttacggccagacctcccgcatatctattcacaagtttcgtgcaaaattttagttttagttcggtagctagcagtgtattagtactggagtgtacgtgtgttaagtgatacgagtgttttgtttgctgtaattattttgaatattggtttagtatttcgtttggagagtgtcaagtgttgattattgtaatttaattaatgtgaatagtgatgtggcgcccgtgggattgaaaaccacaatatacgactgctacaaaagcaatgaaatacctacaatagaaataataagaaagaaattggaaacaac

SEQ ID NO: 14787 - DNA, 428 bp, Diabrotica virgifera
ttaatcattcagccagtagtgtgtgtgttgggtaaatgtcttgttacttagtaaagtcaacttcattgtctttacaaagagatgctaattgtatcctaatgtctgcagtttctcaggtgagtatatgaagatgctactgacccctataagtttaattaaattaaacttcctatcaatagttgcttgcacaattggaaatgaaacttcatggggaaagtcttattgattgtgagaaacagacaaactctttgggaactttatgaaaatttgatataaaagaattaaagttatatcaattatatgattatatgcagtaaccgccactctattagacacatgtgtacattgagctaatacagtcctggatgctggaccctttacttgttgcactgtttacttttatgtctagtgacgtctagaatgtcaga

SEQ ID NO: 14788 - DNA, 427 bp, Diabrotica virgifera
ggttgagtccgaattggctcccatagacaaaatttattttacctaaacatatcacccagcgttgtcacttctttcaaattttctctttttgttagaaactggtaccttcctagaaatatctatgggaaaggaggaagacctaacccttcggtcctaacttaactttcgggtattagagtgtagagcgcaaaccggccgatttcaggtaagagcgcaaaacggtcgagcgcataccggccgacaccgataatttgtgttaaaattgccacatatgccaatgttgaactaaaacaaactctaaaagtatttgtctaaaagtataattttcctataaaaagtctatatcactatgtaaatttcctaagcagtataaatattacacgatttggcaacaatgtctaatgtttccgcgattatatgagagcct

SEQ ID NO: 14789 - DNA, 421 bp, Diabrotica virgifera
agcggccagtcgagctatcctggatttgttgccgaggaaataccagaatgcaatatgatatcgcttataataagtttgagaaatggtgtgaagcgaaaggcgtttctgggaaatatactgaaaatgtatttctggcgtattttgaggagaaagcaaaggtgtggaaggcatcatctttgtggtcgaattattcgatgattaaatctgtgctacgcataaatagcgacgtagatatcagcaaatagtttaagcttatcgcgtatttaaagcgtcaagcagaaggttaccggacaaaaaaaaaataaaaaatcttgactagagaccaaattgactagtttttgaagtgtgcattagatgatgagtatcttctgatgaaagtagctctgattgtgggaatatttggtgcctgccgcagggagga

SEQ ID NO: 14790 - DNA, 426 bp, Diabrotica virgifera
tattttcccaccaaactaataaccactcttagtatttttgtattacgacgcatgtttcacaagcatgccgtttcctttttaaattgcagctgatcaaattgttcaaagcttcatttatatacaatactttgttgattgctatatcttcgagtttcgtgagagtgctcacatcatgagtgtttcacatcagtgctctgtcatctgcaaatgctaagcactgattgattttgtggtatattagaccttttctattaatatttacttcctgtataactttttctaattatagactaaaattatagataataatggatcatcttcacacactacttctttgatctcaaaattttccgttatactagatattgtttaccttgattttcgtcactatcatttaaagagtttaattttggtattcttataagc

SEQ ID NO: 14791 - DNA, 426 bp, Diabrotica virgifera
tattactggctacattcttttctaggcttgatttactaattgaggtttatattaagaaagtttttttatgatacagaaacttaaaaaaatttaagcaagagaagcgaaagacattactacagttctactacttgtccaggttatgaggagttttcccttaagaaaaatgtttcggtgtctttgcggattcatgttaaaaaatatgccctttaatcaaatctgaagggagtcaggcgaagtttttgggcacaaattgtttaaacaatttttaaaacaaattccaaaaatcaccttttttgcgcataattaacaattacacagtgaacaagcagaattgcttataaagaggaagaagaagaagaattaacaaataaaaaacaaagatttaaattgaaataagtcgtcattctctctctctctctctct

SEQ ID NO: 14792 - DNA, 425 bp, Diabrotica virgifera
gcctgttaaattttaagaaatatatcagtattcaggtaaaatgccttctgagcttttaaaacaccagatgttaatggtctgctcagtttatagaaaacaaaattcgacatgtcaataaatcagtctttcacttctttaaaaatcgcagacatgtaaaactaatgtttgtaggtcagtatagtcacagcgggcacccggggcagtcacaccaccacactagcaaagaataacaaaccctctttcgagaaatattcacgctattttaccgacacaaataaatatattattgacagtttgttgtgtttacacttactttaatttcatttaattgttccgtaaaccaccaacggaacagaattaaataatttcaatactcagtaataaaatttcaatgtgagtaaccaagcactaacttgaagacggtt

SEQ ID NO: 14793 - DNA, 428 bp, Diabrotica virgifera
gaacaaaaaaccaaattttttgaaatttttaaatattttattttttttttattaatgttcctggcatatttgagagggagcataattcaattattattgacgaagttgtcacctggctttatccgcaaaggtctgaatgccacctctcacatccacctaaaaacagatccttactggtctattagtaaatttattatcaaaggtagtttctgtttcaccacaaacataaataacatcaatgaaatctttaattttaaaattgtttaggtcttctgacaaaatacaggcaaagaagtgttacccctgaataatttatgaattttaggcataagaaattttacttttatgtgaaattattattgaatttttgtactatttagatcgtggacaataaccaaagcgatagcgtacctgaaatcgaagatggt

SEQ ID NO: 14794 - DNA, 427 bp, Diabrotica virgifera
tacgatcatttaacccacgcaggactaacgttaatatttgacagtaacattcagttgtactaaaaaattgccttaaatgcagaggggcaactaaaaggttaatgacagttagatatcatgctggctgccatattcgctgtcgcgactttattgatagtagctctgaataatcatataatcgattttctgtaccattctcttttttcggccatgatgttcttcttttaccaggaccacgtttaccttggtgctgctccttataaactataatatagactaactttcatccaaacccttaagtgaattatgttgcctttcggcaacatacatgatattaaataggcaaaacacttggggaaacaaatttaaccatactacacgtgtttgactaccgcatgatacataaattaccggaatgagagatcac

SEQ ID NO: 14795 - DNA, 423 bp, Diabrotica virgifera
tgattggtatcgatagtgtggtaacccttgtagttcagattgttgatatcggaaggggttacttgatctatgaattcgatgttgtcgattttgtcgaagaccgaagacagtgcgtcgggcgtaggcacactgcctttgattggtggaagtgtcgatgtgtccctaatgtaacctgtgcccagggactaattcaccctttctcaaaaacgcacccctttaaatggtagcactccgcggttttttcatatatagatgtccattgaccatatgaaataataaaaccccgttaacgttgtagttccttttagctatcttattttgaatataatcaatagcctataaagatactgatataatttagtgacttttagtgaattatcagttagcaaaatattgcagtattgccagtgcatttctagcggc

SEQ ID NO: 14796 - DNA, 417 bp, Diabrotica virgifera
gtattcgtagttccagcgatattttccaaggtacagtggaacgatcaataactcggattaatcgggaccacggccgatccgggttatcgaaaatccgggttagccggagaatatgttaaaaattaataaaatacggtatacttacagataaactctttataattgaaatacgactgtactacacacaatacggtcacaatcggaacgatgttatgttatttaagaacagtggagactaagaccattgtttaaaaaagaattttttaaatagtcttttagtcttatttaaatttaaacaagacctggtgcaacagcccttagcctggtgcaacctggacaacaggcacctaacgggtgcctgttgtttccaataatcggagacaatgaacgtcgctctgccgccgtgtgccatgagtc

SEQ ID NO: 14797 - DNA, 428 bp, Diabrotica virgifera
  SmartBlast Evalue=6E-21; Info=Synaptosomal-associated protein 25 n=3 Tax=Apocrita RepID=E2AV89_9HYME
aaatggaagaaaacgtcggccaagtcaacaccatgatcggtaatctgcgtaacatggctatcgatatgggttcggagttggaaaatcaaaataggcaaatcgatcgtatcaatctcaagggtgaatccaacgcgacgaggatagaggtggccaaccagcgggcacatgaccttctcaagtagacacaacacacaaaaacactgaaaagtttttactttctatcattttttgcgattccaactcgttcctactgggtacttgaaacaattaaatatctattgcttttttagctacttaattagtcagtgttcaataatatataaatgctgtttcgtaactaacaaaactagaataatcgtcgtggtgacataatcatgaaaagtttataaaacatctataatttggtcctttcacgtcattatttcaat

SEQ ID NO: 14798 - DNA, 418 bp, Diabrotica virgifera
ctccggttggaagtgtttcttccttcctgagagggtgtgtttgagctgctggcgggtattggacctgaagcttcgtctacagctgcggtcatattccctgatggggttgctgtttgaggaacgctcagggtacgagcctctgcatgctcgtttcccgaacacttaaaacagttacgtttaagcgtgttttctttaccacaaccgtggcagaaaatccgtgtttggggtctggaacaatcccgaaatgcgtgaccaatcgactgacaattccagcaagaaaaagaatgaagtagtcacagacacattcggtgtatagggtctagattgccaagaacgatttcttgagggttgagaattaaaaccaacaggaccagaattgaattgcgaagtggtaggggaattaagagaccaagataga

SEQ ID NO: 14799 - DNA, 427 bp, Diabrotica virgifera
gtttgttacctctttggctgtttggctgttttttaaattttaatatcaataaacaacaaaattgttacccagttatgtatagctgttattattattatgtcacgaatgtttataaataagtacataatattgtatttttctgtaaacgaaagacttaaaaccgatagaaaaaaaataatggattttgtggtgatagtaagatagttcaatgttgttttaatcttaaaataattagctagctgttaactatattacttgtattgcctatttttgttaaaacatactagtaaatttaccgatattaactgaaaattgtgtaaacatttttttttaatttcataaatatttgttaaaacaagaaaacatcaatttaaagtattaggtatgtaagtattttattgtttgagaatggcttatacttaatata

SEQ ID NO: 14800 - DNA, 423 bp, Diabrotica virgifera
aacgtcgatttgtctccgctttccctgcttataactttaaaacgattcgtcccggaacaaagtcgtatagaaacaaaacaaatacaattgaattttgtatgatatacgactggtcaaaaatgtcttaacgtattaccctttctgcaatatagcaacaaatacaaaataaggaggcaaaatacgcctgttgttattcaatgtttttaaccactttggtggcacttagaaccttagtaattcgcttaggaaattctttgaacatacttaaaccgtttaccaaatttcattaaaatcgacctaatagattttgcataataatttgcaatctaaatgtttttaaaaaagttcaatattttttaaaatctttctgaacaaaaagtagaccatttagaagttggctaattttttttacacatagagagg

SEQ ID NO: 14801 - DNA, 425 bp, Diabrotica virgifera
  SmartBlast Evalue=7E-28; Info=CAP-D2 condensin subunit n=1 Tax= Tribolium castaneum RepID=D2A3E3_TRICA
aaccaagtagttgaagaatcatttgttaatctcatttctggtatagcatatgagtttttacagcatccttctattaagaagcaaactgaagaatttaatgaaattttcaatgttttgggctacctcatgaagacatataaccatggtacaacttttgtgatacgtgtcacccaacttgttaaattaaatgagcatttggtgcaatgtataccaaaaggcatccaacacctcgtacaaaattttaattataaaagcttactacatgaattgattgaagaactgacagagtggcaaacagatgaaaaaaatcaagataatcagggagcaagaaattgtgcaacagttttatcaacattagctgctctaatgccagatcttatgatgcctgaagtggtgtccttaaataattatttatatcatgagcc

SEQ ID NO: 14802 - DNA, 426 bp, Diabrotica virgifera
ccctcgcattatataattttcactatttatataagtatacctatacttacttaattactgagtcaaaactgaaacaacatatataaactaataaataatttattaacaaattatccagcatacttaatgccttaatttaacgctgtccattaaatcaaaaagaatcatgaacaactcattttggaatacctgtatacagtagtacatgagcgtcatttttctttgccatctcatagctaaatcttgtagactgctgaagcaatcttagaaggctaaacattaatttaattaaactcgagaataattagttcattaacagaaaataaacataacctcaaacagttgtcaagaagcatattgcattaattaactcgctgagcaaaaacgaatacaaatctcttaattaacacgtttcttcgactaaac

SEQ ID NO: 14803 - DNA, 423 bp, Diabrotica virgifera
tttcttcttattattttttggactatggccttgacaattatccagcaaccaggaccatatgattggccaatataattagaagttcgaataaaagtgcagagcgaagaaaccaggtgtcgcttttccgaacttgcacggtcccaatatctgccaatacaaataaatgtagaaccccacttttataatatttggaccttttacttgatgaaaagacaaataacgaaagcttgggtcgaaatgctgtgtagatgtttataaaaaattatcgacccatatattatgatgttactgagttgtagtgtcactgtattcgtggacattcaagtttttattgcaaagccagtggcaactcaagggttgttaaagtgtagtgaaatgaacgtttcgaagaaaaaaattagcaaaacaaatcgccagtgaaga

SEQ ID NO: 14804 - DNA, 424 bp, Diabrotica virgifera
  SmartBlast Evalue=2E-50; Info=Aldehyde dehydrogenase n=1 Tax= Aedes aegypti RepID=Q16HB6_AEDAE
caaggatgttaggaagattgcatttactggctcaaccgacattggacacctcataatggaatatgctgcaaaatcaaacttaaaaaaagtgtcattggagcttggaggcaaaagtcctttagtagtttttgatgattatgatgttgatgaagctgtcaaaattgctggcaatgcaatcttcggcaaccatggccaaagttgttgtgctggttctagaacatacgtacaatctggaatatacgataaatttgtgaagaaagctgccgaatatgctaaaaccattacagtaggtgatccttttgcacaaggcacagttcagggaccacagattgacgtaccatctttaaataaaattctcaccatgattgaaagtggaaagaaacaaggagcgaaactagaaactggaggtagtaggataggaact

SEQ ID NO: 14805 - DNA, 427 bp, Diabrotica virgifera
gcgggcgaatagtaatacatacgtgcgtttgtttatagttgggaatttgctatttgaatgtggtttaagtgtcatggtctccatttcaaaggtcataactggtagaatataactattgaatattgaatagccatttctttagatttattggtatatttttgtttttcaacacatcactgagtctttctactgctgcccaagtcattcggattcttctagttatttctgccgtttgagtctgtttacctggtttgatcgtatgacctaggtagttatacttatattatactcttcgacactttagatctcacttccatctaagtcgattgtgatatcttgatttgtcatcaagatattaaatacaagatattaaaaagaaagggaaaagacaaacaatatatttacggagaacatattgtgatgtatt

SEQ ID NO: 14806 - DNA, 425 bp, Diabrotica virgifera
tgtcatattttaccttgaagaattctttaaattcataattactcgtatttaggcggtggtctccagtagacgctgtaggctgcgtaaactttgaaggacataaactattttacacccgaaaatagttaaaaaaagattaattctaaaacaaatttaagttacagggtgaattgaagtgaccactgacttagccggttgtctccaagaggcggtaggctgcgtacagcgtttatcggagaccatcgacttagatttttgtatcaaaagaaacgaacaactatttattatacgaagtattgatttgctttaagaaattataaatttagtgacaataaaagtattaacgaattaagaaaaaaacatgaatatgtggttcctgtgaacactttgtaaggtgcgtgattaaaatgtgaactgatgtcggc

SEQ ID NO: 14807 - DNA, 424 bp, Diabrotica virgifera
aacttatttcaatttagccagttgttccgcgacacgacggggagtctcagcgacgcgcctatgtgatgcgtctctgacgcactatatgattggtgtatttaattagcacattattaataattaatcaaaaaaataaataatttattaaaaaaaaactatgttaagaataaatcataaaattttaataaattaatatcaagtatttgttgggaacttttagcaatattacgtagagtatctatacgtgcgacagagacgcacaatatagtgaaagcgtatgtatagcgaaagctcgccaccgtgggccggcgtattaaaattcgagtgacagacataggtaataaacattaaaaaaaggtctctattgaaatagtccccgattacccatcagtatcttgaaatcaatgtttaagcttcaacttat

SEQ ID NO: 14808 - DNA, 425 bp, Diabrotica virgifera
  SmartBlast Evalue=7E-44; Info="Short-chain specific acyl-CoA dehydrogenase, mitochondrial n=2 Tax=Culicini RepID=B0WWP9_ CULQU"
gcttccccattgctggattggtccagtgtacaaagaattattaacagacataattactcctgcagatgcacatcccctagatatctcctccattccgatagcatatgctaaatagtccagtcctgtaccatttaactcctcgggtacagccactgccattaaacccagttcacccattttcttgatttgttcttttggatataaatgctctctgtctatttttgccgcaattggttttaattcaccttccgcaaagtctctacaggttttttgtagcatttgatgtgtttctggtaaggcacttagggaggctataccccttttcatttggtaatgtaccaaatgttttaaagtcttatttagaagagccatttttgaactctgtttaaatttttaaatttatggactttgaacttagtaattat

SEQ ID NO: 14809 - DNA, 423 bp, Diabrotica virgifera
atataaccaatatgttttcccatattattaaatcgttttgttcattagtagtattgattgcccttgtacagcaatctagggcagacgatttggaacattgtgatcaagtcggcggaaacaagttagtatacaaccacaaagttgaaggaacatatatcaaacttcgtattcccgaagaaaactttcttgagaatcttattaactgttatcaaatcctggatttaacaggtagttcatgtaaaccgcaaattacagaaggaggatacagccataactttatggagttacttcttgaaaatgcaaaaggcgaaatgatgcaatacgaaattcaagtttatactactgttccaactactgaaacccaacaacaatgtggaatgttttgtagattgtttaaacttaacaataaaacataacaataat

SEQ ID NO: 14810 - DNA, 410 bp, Diabrotica virgifera
  SmartBlast Evalue=1E-16; Info=Beta-glucosidase n=1 Tax= Reticulitermes flavipes RepID=D9ILU1_RETFL
ataaatttcaacatattttctatactccacggtacgattggcatccattaattccgacactagttccaggaaatcgaatgagttttgccttaatgtcagatcggaaactagtaacattactgggagcttcgggtacatctttagctaaatacgcaaaataaacattcaacaaatataaatcagaagttccttttatgtaattgatctcttctgtagtgaattctggtaatcgacttttgttgtatccttctagttcacttctgaatttgacgcgtgccttcacgcttggaggccaatcaccatagtatagtggatgagagtacatgccacattcaaaatcaagatttcttctagctgcgtcaatatcctccttggaattcgtgtaaggttgataccattcacagtctata

SEQ ID NO: 14811 - DNA, 421 bp, Diabrotica virgifera
  SmartBlast Evalue=5E-13; Info=Reverse transcriptase n=1 Tax= Anopheles gambiae RepID=Q868R2_ANOGA
atgcatgcttaaaagccgcgtggtatattcgacactgatgggcgagaccatgtcagcacgggttgccagaggatgcccacagggaggtgtattatctccgttagtgtggaatctggttatggacggactgattggaacgctcaacaggaaaaaatataatgtcctgggctatgcagatgattttgtcattctggctcagggcaagttcaatacaactgtcagggataacatgcaacaggccctgaatgtagtatcaaaatggacaagtgaggtaggattaactgtaagccctcccaaatccaaaatagtagccttcgccagaaggagaaagttagagagaataggacctgtgaatctcatggggatttccctaaaggtggagagggaggtaaactacctcagagtcataatagactcaagg

SEQ ID NO: 14812 - DNA, 424 bp, Diabrotica virgifera
gtcacgaacagtacctacaggctgtgatatttttggttttgagtagaaaatagtagataagatgctcacttaccttaggaatccgataacgggctacgaatactcattctggcccgatgcgaaatttttttatcattataaaatatatcgaccattatacttacacgaagattggccaataaagggaagagaatggtatccacaatactggcccagccaccattcatactggcactacttgagggacacacccagcgagagggcctgctctcaagtgagggttgccagtaacctttattggacggacaccattttaccatgattgttattaggagaaatttatataattgtaaataagttgtatatataatttatataatgttaaatatttttgtacaaaagttttgggatcaataaacattct

SEQ ID NO: 14813 - DNA, 420 bp, Diabrotica virgifera
acatacactgaccacatggtaccaaaatacacatttaataggaacttcggaatagaaatcaatgaccgaagggagtggaacagcatcagtagtaaaatcaggggaacgatatggtatacggacggatcaaaaaccgatgaaggcactggagccggtatttttagagagaatgtaggactcagtttctcactaggaacatacacaactgtgtttcaagcggaaatgtacgcaattctgcagtgtgtcataatgaacaacttgagggcctatgaaaatagacggatcaatatactcacagacagccaagcatcactgaaggcactaatgagcccgaaagtgacgtcaaggctggtatgggaatgccggcaagaactggaagaactggccgaaagaaatagtgtaactctattctgggtgcca

SEQ ID NO: 14814 - DNA, 421 bp, Diabrotica virgifera
ggctgcagtggctagttcgcttagagagatggaacatttataaccaaagaccggatgggtgaggagaacaggcaggcccagagcacgatttaaccttccgatgaccaaccttttttgttacacggatgaccaacgggggtaaaaaatgaccccaggataaaaatgacctggaatgaatgttttcatcatttaaatcttatctaacattacatcctcgttttctgatactatttcatcttctatatcatcataaaaatcgctagcagtaacaatttcctgtaactcagcctcagtaagatatttgcgggccatatcttatatgtacacaaaatactaagaaactataataacatacgccaggaaataataataatgactaactgtagcagacaggaatgtcatgattcgtacataacaaggc

SEQ ID NO: 14815 - DNA, 423 bp, Diabrotica virgifera
  SmartBlast Evalue=9E-31; Info=Macrophage migration inhibitory factor n=1 Tax=Bombyx mori RepID=Q2F5Y8_BOMMO
tttgaatttaaattttctttccaattatttttggtgatccataataaataatagtaaaaatgccacattttagagttgaaactaatgtacccaatgacaaaatacctgatgatctacctgcaaaattatgcagtatactttcaaaatcattaggaaaacctataaattattgctgtgctacagtcataggaggtgtgaagatgtcatggggaggtgacaatgaacctgctgcccaagcagttttaatgagcattggagctttgggtgttgatgaaaataaaaacattcgaaagtattgtacgattgcatttctaaatcacttggaattccagtggataggatgtacatccacttcatggatgcaccaacgagcgaagtcggatttaacggaacaacattccatgagttatttggaagataaat

SEQ ID NO: 14816 - DNA, 424 bp, Diabrotica virgifera
  SmartBlast Evalue=3E-22; Info="Pacman protein, putative n=1 Tax= Ixodes scapularis RepID=B7PTZ6_IXOSC"
ggccttctctgtgtaataccaataattatttatctttttggtataaccaggcgtttccttattccttttgttcaattttaaatccaagccaacattaacttttcttgcttcaacagcttcactagctttaatatacatcgaggtagttatttgtgaaaaaatactattagaaatacctaaaggactagcaacagtatgcgcttgtttgtatttcttgtcagtgttctcatgtatagatctaacatggttcaaattcggctgttctactatcgaaatatatatttttattctgccagttttagtaactgttgaggcgtccagtaccactccttgagaaccataataaggatttccgagtacaaaacaagtactgtttttcggataaatactttccacttcttttctaaatgatacaatggatcat

SEQ ID NO: 14817 - DNA, 421 bp, Diabrotica virgifera
cctcccctctcgcccgttctcattctttttctttctccatctttctcactatttctctttttctcacttttttggctttctatttatctcatttaaaaattcataaataaacattgccttgtttgttaaaaaggagacaactaaaatctgcttcttttaaatataaaaacgaaaaataaaaagtaaaaaaatgaattgatgcaacaaaagcaacataaattcttccaaatacatttgcactcaataacaataaacttgataaaaagtatgtgcttaaacaaaaaacgtgacctgacagtttaaaaaaaaacgattttacgttaagaatgtagtgatatggacatattataatcttgaaattgtgatacaaaaacacaattacttattagtagaatcttaacaattagcgatattttacata

SEQ ID NO: 14818 - DNA, 424 bp, Diabrotica virgifera
tttaacctcaggaatctgaggttgagctgtggcccattatttaccaaacaccctgtatacgaaagatgaagtagttttcaatcctaataacaatattaataatatttaaaaatattaaaatattactaaaagatttttaagttgaaaactaattggtaaattttcttggtaacaccaccaaggcttctaaaatttgcaagccagatggatgctgaagcgaagaaggcaagagagaatttaaaaacttacaattcgcaacccgtctgttcagctggtaaattacaacagaaaatagacctatatagttactcaaagaagcaacgaccaatataaaaataaatctaaaaattccatttttattcagttgcaatgtgaaggcaaaacaatcagggccgtaactaccattggggcaaccggggcagtg

SEQ ID NO: 14819 - DNA, 424 bp, Diabrotica virgifera
tgaaatttgtacagttgaagaagaaggtaaagaaccacaaacgacagttaccgttgaagaaattgaaacacctgaagaaattgaacccgataagcctgttagtattgtcgaagaattgccagaagagatccaggtaactgaagttgttaccaaggagggagataaaaggagaaaagtcatcaagaaacgcgtcattaagaaaaataaggacggcaaagaggaaaaaacggaaatagttactatagaagaagagggcaaagcaccgcaaacttcagtaactattacggaagaacctgttattgaagaggaaactaaaccaataattatcgaactaccagaagaagttcaggtagttgaatccattgaagacggaaaattaaagaaaactaaggttagtaaacgtataattcaaaaaacaaagggc

SEQ ID NO: 14820 - DNA, 423 bp, Diabrotica virgifera
aatatcactaatatctttttgtgggatttcgaaagaatatcatgcaaaaagattatattatataaagtggtagaaaatagaaagaatttttgtagcactacattccactaatatttaaagtttaattgaaaatggtgtgttaagagaataaataaaattaatatgtagataaatattcgtttatttgtatattatttaaataatttaaaaatgcgttttgacaggcagtttttttaaaagttaaaggaatatataaaagaagatttgtttttaaagaattaactcaaaaatcaacattaaaaataaatacactaaagaattgagagtgtaacttgccaatgcttttggaaagatcattttcagaagatgctaggtaggctcagggataacgcagataaaattgtcgacactcagcgaatatag

SEQ ID NO: 14821 - DNA, 415 bp, Diabrotica virgifera
gccacttctaatcttcgatttcccgcgagagttttgtttatcatttttgttttctttataaatctaacaataaaacactgaaaacgtttcccctctacacttccacaaaatttattataactatgtgaccacagctatttcggcagagtgcccctctcaaatgatttatgggtttgcccttttaaagtctttaactgaagaggttgaggagtggggagctgcccgtctcgagttggtcactcagaattacatctgtaattcaatttatgaacttccatagattccaataaagacagctcaaggcccttattttgaacatgcaaaatttgaaactcttcatcaaaagaatgaccatgatgcagaaggcgaagtgcgcatgtagaagtgtccgcctctctactgttgaaagcccctt

SEQ ID NO: 14822 - DNA, 423 bp, Diabrotica virgifera
  SmartBlast Evalue=5E-20; Info=Chloride channel protein 2 n=1 Tax=Harpegnathos saltator RepID=E2C3F5_9HYME
ttgtcgcatcgatccagctcctttccaactagtggagaggacctctttgctaaaagtacattcactcttctccctcttagccatcaacttcgcctacgtaacgtcgattggaaaattggttggtgttgtaggtctaaaggaactcagatgtgccatagaagatgcaaatagtgggaatcccccaaagaaatcagaaaaggcgtttaaatttgatgtatccgtccctcctactccaacgcctgctacacctgttatcgcagttgtgcctcccacggatggagacaacgatggaagaaatatggatagaatcgattatatcgatgcgtgaattaatattaatcttttaaagatataatcgctcactttggagcaggttatggaattctcgatcaagataaaagtagtgctatataataggctgcc

SEQ ID NO: 14823 - DNA, 414 bp, Diabrotica virgifera
tcggacatcttggatattaaagcaccctaatatgtctgtgtagatattggcattggatccgactcggtccgaccgtcacatgtaacaccgttgccgtatcctctattttttcatactatcacgttacaattttttgtgatattatatttgtgtgtgaaatgtatcattttgtgtattttaggtatgttctaatatgttatgtatatataggtttttacttgattattttaaatcattgtgacgtttaacttgctagaaaccttgtaatattgtgtaatgtgttaaaagtaagtagttttgaaacaccaattaagtaaagtttattatgttgttgttttcaccaattttgaaaaaatgtgaaaacattgaatttccacgtccgtctgtccgtcttgtctgtgtgtttgtaaactc

SEQ ID NO: 14824 - DNA, 423 bp, Diabrotica virgifera
ctttacaattttcttgcggcttttctttttctttctagaagattttccgctagtttcttctgattcggatatcgaatcatcctcgtcaatttctgatggtaagtcctctaccttttcattgggtacatagtcttcatcgctagaatcgctatcatctggtaaatcatcattattcatatctcttgttttaggttaatacctatctctaatttgaactttatcaacaattaattacgttattatactttatcaataattaattaagtacgtaataagttcagtaaacattggtcgctttgcttccataaaattaaaattactggattggtttggtatttgaatatggctttttttaacacagagagacagacatacacaaacacagcacacccccagcccccacatatacacatatacacaaac

SEQ ID NO: 14825 - DNA, 423 bp, Diabrotica virgifera
  SmartBlast Evalue=3E-12; Info=Mical n=1 Tax=Aedes aegypti RepID= Q17A11_AEDAE
gttctgtctagccaaaaactgttctttgctccactttggaactttttccttatcgatagccctcgacggttttcccatcttattctccaggatcttcttttctatttctttaatattccaatccgaggtttcgattttgcctatggctctaagtaagtctttgggctttttgtctactgattgtctgtgtccgaacttactctccaaactctttattttagctgctatgtcttcgtcttttcccattcctcgattgaattgactagggcggttctcttgatccacactcgctccgactttctccatcgttcttctctttctcggtttcctgtcaacgctgcccactttctgagtgaccatatctgtgtgtttgtgtttatgtctactcgagggtctgtgtggttgcgtaattgggtgtgctat

SEQ ID NO: 14826 - DNA, 424 bp, Diabrotica virgifera
aatgacgcatttttgtcatagaaaaaattctggtggaattccttttatccgaagaaataaaacaaattacttggagaaaaaaacttattgcatggacaaattattaatcttttatgcgctatttccagaggttacaacagtgtctaattttttgattttttgacagttgtttagctgttaagttttttacgactcctctcactgaacttgtgaatatttcgacagattcattgttggaaacatacagtcggaaaaataaaagaacacccatgaacaatcacatcaatcacccatcctgcattgctgtcttcctctataacaaacgtttgttacttatagaaaaagacagcaaatgcaaaacaagtgattgatgtgattgatgtgatcgttcatgggtatagggctttttcatcgattgtcactt

SEQ ID NO: 14827 - DNA, 422 bp, Diabrotica virgifera
  SmartBlast Evalue=4E-18; Info=SCAN domain-containing protein 3 n=4 Tax=Simiiformes RepID=SCND3_HUMAN
ttttcttgatgtcttggttagctcgctcgactgaaccttgactcaggctgtgccttggctttccatgaactaattatgcctcaggccagtatgacattacctcatttataactgcattaccgaactctcggccaaatgcatggtgcgccaaaagtcaagaatatatccgttaattgataagcaacttcttccacccttttacgttgtaatggtctcaacaaaacaaattttgttaaaaggtcttgataaaccataataaacttgcagccgtaatccatttctgattgtatatcgatcaaatctacttaacagcgactattcatttctgaatgcaatataggcttcgacacaagacacctcttcgctttactcttgttatatttgcgtattttctagcggttttagtgttcaacgtatcccaa

SEQ ID NO: 14828 - DNA, 423 bp, Diabrotica virgifera
  SmartBlast Evalue=2E-18; Info=Histone-lysine N- methyltransferase SETMAR (Fragment) n=1 Tax=Camponotus floridanus RepID=E2A4J6_9HYME
gagtacggtgaatcttctctttcgatggcaaccgtcaataattgatttaatgagcttcaacgtggtcggatctcgtattggcagaccgccgactgaaggtgcgcaagatagctaagacagtaggtatctcaaaagaatgtgtgagtcatattctgcatgaaattttaggcatcagaaactatcggcgcgatgagtgccgcgtctgctcactctgaacaataagcgcaaacgtgagatcacttcagagcagtgtttgacgttatttaagcgtgatccgaatgagtttctacatcgtttcgtaaccgtcgatgaaacttagatccactggtacacatcagagaccaaagaacagttgtaggactgtctagtcggtcggaaaggcgatggccatgggtcgattcgacgccaaagtgcagaaaaaac

SEQ ID NO: 14829 - DNA, 418 bp, Diabrotica virgifera
  SmartBlast Evalue=2E-11; Info=UDP-glucose pyrophosphatase n=1 Tax=Aedes aegypti RepID=Q17M97_AEDAE
acgtatgcaaaagtttcttttgcaatatttgtgttggcatacttttagttaacagatatatttttaaaatggaaaaaataagtgaggtgttcctaacagaatatattcctacgatttatacgtttcctagaacaatacagtatttacaaaaaggaaaagagaaaagttgtgatgttcttgctgaaagagatggtgtaatcattattgtatataatagcacaagggatgttttggtgcttgttaaacagttcagagcttcagcttatattcaaagggtatctgaggaagacagaaacaagttagtagacacccaaaaataatccggctcaattaggcataaccttagaattctgcgcaggattagtagacaagagcattccttctgaagaaatagccaaagaagaaattttcgaagagt

SEQ ID NO: 14830 - DNA, 422 bp, Diabrotica virgifera
  SmartBlast Evalue=3E-22; Info=Putative NADH dehydrogenase 1 alpha subcomplex n=1 Tax=Graphocephala atropunctata RepID= Q1W2B1_9HEMI
gatatagaggtgaggtcattagaaggtttttaatattttgcgtataaaatattaaatattaaaatccgcaaaaatgcagggtatgtcattgaaatctcttgcaaaacataaagctttaattcctctatatttctgtgtcgctttgggatgtgctggtgcagctttctacaccactagattggctttaagaaatcccgatgtccaatggagtagatcaggggacatttctaatgaagaatttaggcagaagcaatataagttctattcacccaatgttgattattctaaaatggaaagtccagctccaaagtattaggatgactgaagaatagtgattcgtagatgtattgtatatgtttctaaataaattataattgctaagatttgtcttgttaaattcaataaataacattaaccaaaaa

SEQ ID NO: 14831 - DNA, 421 bp, Diabrotica virgifera
aatttatttattaacaatatatttataattaaatatttttatattattaatattaaatatttttagggatgagcttaaaaataaaattttattaaaatttaatttttaaataaaaattaggattaaaaattttcatattttaaaatatgttattatttatttttatatattattatttttattttttataattttttattaaaatataaatttaaattatttaaatttagtaatgatagataatattagtattaaaaaattgtatatttagtaaaaatatataggtttaataaaggaattcggcaaacattttttttcacctgtttattaaaaacatgtctttttgtattaaatataaagtctcgcctgcccactgattaatttgaatggccgcggtattttgaccgtgctaaggtagcat

SEQ ID NO: 14832 - DNA, 413 bp, Diabrotica virgifera
gtttttgatggtgggggcagggagaagggggtggtgggttgaaattacgatgaatcttatgtctcaatcacatagaacttaaaaaaatgaaaaaattaaattctggtaatgaagggggtattttttaatttatgtatcccgtccataagtggaaagtttgatgcgccactgtagacgcatgtgccactgaaaagtgacggcacagtgctcaaacgttttcttttaggttccactattcaagttatagggtcccgtcgcgcccaaaaatgattaagaaacctcacccatagcggctcttagtctataacctcaaattgtgatctccaaaaatgtcaggtgaaggcgctaggtgtcgcgtcagtcatgcacggagcgaatttaatgtctgttttaatgtaacagatttaatttca

SEQ ID NO: 14833 - DNA, 420 bp, Diabrotica virgifera
atattattaaatagtattttagtactgaaaggtactcttgctttaagtcggtaggatgaaccggtttctaaaaaaatcacttttaaaattttttgtgttttgaatttaagaaaaattaaaaaaaaaggtgtatttaccgacttaaagcaagagtaacttttagtactggaatacctcataatttaatactctactgtcaaaaatgcttaaaaattaaagcaaattatgagatttcgttgatctacccaagacggatgcctatgaccgatacaagaaattcacaattgataaaatcgattcacctttggaagagaaataaacgtaccagttttcgtttttctgaatagttttttttttcaaatttaaaaaccgaaaaatttttcgaatcgatttttccagaacacggcgtatcctaccgac

SEQ ID NO: 14834 - DNA, 421 bp, Diabrotica virgifera
gaccttcttctctgcttcaccgttgttcctcttgttctttcttgtcttagggttgaggagcttcaactgcaagttcctcgggtttcttttcttcttgtgcttgtttcttctgtcttgttttcgtcctcgtacttcttgtttcagtggtagcttccacagttaaagaagcagtctcttttttagtttgtctcttttcgttgtcagattccttgtcttctgttatgtcaatcattgtaactgttgtattttgaatcattacatctgaaggtttaccattgcagatctctgaatactcaagaattttcttggtcttggtacgagtagatcttttgacaggttccacgggttcttccttaattttctttttcttaggtggcagcgctgtaggtgctaacatttctccagcctgttcaggttgttg

SEQ ID NO: 14835 - DNA, 422 bp, Diabrotica virgifera
cagaaccagtttttttgtaaacacagaaacataccaatatctactaccattacctctacttgatacaggagctcttccacacagggacagctttacattggactttatagtagccacgaggacctcacccatcctattggacttgatttggatcagtgattgtaaaagctaagctaatttttatctatattatttgcatttcatagtactatttaccttttgtttacatttacttttgtgaacttcttgtgtgcacacaatcaagcaacttaagtatagagttttgaataaatgggggggttggtttttgtttttattaataatagtagggtataaaaaacatgtgttaaaataaactagataatggtataaataataagtaattcaatcagttttaaaattaaataagggaaggggtaata

SEQ ID NO: 14836 - DNA, 413 bp, Diabrotica virgifera
gctatctcctttaacagtcgctccgacctgcaccgagaattttcccgccttatccaatgtcaaattaaaactcgtttccctgtttttcatgagttgcaccataactattaaaccattggcaattccacccgccaaaacactaacagcagcacgctctaccgtacgtggagccattttcccctccaaccaccaacaaataaactggaaaatacataggtagtgtaccacaaacaagtttagtggttacacggccagtaaacttgccaagtgtaatacttggaaagtttattggctgaaagcatttgcttgtggttttccgtcttcatattttcaagtttatttgctagtagttagataggaaaatggctccaagtgccgcagtccgtgaagctatcaatgctttggcaagtcaa

SEQ ID NO: 14837 - DNA, 419 bp, Diabrotica virgifera
  SmartBlast Evalue=3E-10; Info=dolichyl-P-Man:Man(5)GlcNAc(2)-PP- dolichyl mannosyltransferase n=1 Tax=Saccoglossus kowalevskii RepID=UPI0001D3A161
gcctggctggctaaaaacagatgatttttgagtaatcctagtttaatttctaggacgttgatctatctatggaaattgaggattataagtagggcatatacttaaatgaaatcagtgttcaaaatatcatcttttacctaacttaatttaatccatcaaaaaaaaatatcaaccaactgttcagttaaaataatatgcacaagccatggcgcccctcaaaaaatatcaaaattatagaaaatacctggaaaaggattatattatgaaattaattttgaccctcattatttgtggccagtatgtattgttttgttaatattcgagtttctgttaaatttaatgataatccatagagtaaagtacacagaaatcgactggatcgcttatatgcaagaggtggaaggatttctcaatggaac

SEQ ID NO: 14838 - DNA, 421 bp, Diabrotica virgifera
cagttgtcaagtaaagttatatacatatctaataataattattataaattattattctatcgtcaccatgagaagtttaatacttgccacgattgtactgttcgccgtttatcagacagtagatgcagatggtctaatagcctgccacccaaacttttgcaacgacagtcacggcaaatgtacagaaaacctggtttgcagtgattctgaaattctggttccaaagggaagtctctgcggatgttgcgatgactgctacagaaaactaaatgaaggcgaagcttgcaggtcacgttttttcggaggaggtccattcagaggaaaatgtgtagacggattagaatgtaacgctgaaggaaaatgcgccaaagtctaataattatacacgaactattatgttgataaataaatgatataaatg

SEQ ID NO: 14839 - DNA, 420 bp, Diabrotica virgifera
cacttgcttacatattctgggacacgttttgataattagttgggtatgatgctttctatttcagaacttcctcgtccaccgttaatttctgactaggcagaacggtaagctacatttggtaagaatatatgaattgtccagttaatctggaatctgtagtatagcctgtagatcaaaattccgttgttgattagagcttttcttatcatttcgattttcgagattccgtacttctttttttctgatgttgtctaaatccggtttcttagttggattagccatatcatagtatgatagggctaataaatattatttattacaaactaaacattgatcttatttaggacaaaaagcttaaattatagtcgttagaaaatattcttcggtgtgtaatttcgctaatacttgccggtttcttca

SEQ ID NO: 14840 - DNA, 419 bp, Diabrotica virgifera
  SmartBlast Evalue=5E-40; Info=Double-strand-break repair protein rad21-like protein n=1 Tax=Harpegnathos saltator RepID= E2BGG1_9HYME
ttttgatgttgagtttcgttgtttactgttcatgtacaaatataaaataattccttcgggaatggaaattaccgctcaaaagtgcttgcaaatagatttatgtgtaacgcatattacctaatttataaaaaaataagcagattttatattagtctaaatactaaataagcgtaataatgttttacgcacacttcgtgctagccaaaaagggccccctagccaggatctggttagcggcccattgggataaaaaacttactaaagcccatgtattcgagaccaacatagagaaatcagtagatggaattttacaacctaaagtaaaaatggcccttagaacctctggtcatcttttattgggtgtagtgagaatttattctagaaaagctaaatatcttttggcagactgtaatgaggcc

SEQ ID NO: 14841 - DNA, 406 bp, Diabrotica virgifera
aaataatgacactttttcgttccttcaaaattaaaacactggaaggataaaacactgcagtaagcggagccccgcatactgcagactttttatcggcagatagtttagtcgggatgggctgttagtgcgcatactgagccaactaaacagtcgggttggtgaagagggcgcacactatcaacagccgaccgactattctcgaacgatttagtactaaagttcttatttgactgttgaagttagtagtcgcacaatgaaaaaattatccagacatgttattatcgctctcatataatggaggaggaaatccaagaagagattccgagagtattgagtgcgtcataatttacagtgaaagaaataagacgacgcgacggttaaaagtaacagacgtgatccagaagat

SEQ ID NO: 14842 - DNA, 419 bp, Diabrotica virgifera
  SmartBlast Evalue=6E-29; Info=Stromal interaction molecule-like protein n=2 Tax=Formicidae RepID=E2BPT0_9HYME
ttaatgcccaggacggttaggtaggccgcattattaacggctaatcttggtaaattagcaccagtaactctaaattcgatgaatttggggacgtattggggtaactccacgcaagtcgtcagccaatccgaagtttgctccacagtccagttgtggacttctgatttcagccacgcttcccataattccttgacagaaatgtgatagtcgtcgtttcggtgaaattcttctgtctcttctccgcgcccgaattgtacttcagttcttctttcaaaaaatcatcagattctgatagatctatggtcccatctttatcgtcgtccaattgcttgtgcaactgttttatagcctcaagtcctagtttatccttttgagccatcgctaagcaagcaaaatcttcttcattgcaggtatcgaac

SEQ ID NO: 14843 - DNA, 422 bp, Diabrotica virgifera
caaaataatataaatattatattttataaaatttagcaaaaatgccaaggtccattagttgtcgaggcattaagctaaataaaaaaattaacaaaatggaaagcatacaaataagatttttggaggagtttaatatcgttttattttatttttcaacacgcgaaatttttgacaagtattgactttttgatatttttttactttcacatttatcagatccgtacgacactgcaattttacagtattacaatataaaaattaaggtgtaaactattaagtgatcgtaactacatattatgtacatacatacgttttagttacaaagaataaaacacctgcataataaacaaatatattgtatgtatttctgcataaacaaaacaaaaatccgcggtcatattttgcccatattgtcatattaa

SEQ ID NO: 14844 - DNA, 420 bp, Diabrotica virgifera
  SmartBlast Evalue=2E-12; Info=Reverse transcriptase n=1 Tax= Bombyx mori RepID=Q5KTM2_BOMMO
aacagctctgtgcttgcaaaaaactggtttagcattttccacaactttaattgaaatttccttatgattaaagtttcctaacttactagtaaatacgtttgaaaaactgtttattagatctagaattttactattacttacaatttgattcatcatttcaagcctaatattgaaggcctttatccagtctctccctagaatatttgcagaacctttttgaacaacgtatagctttactggtattttcttgcttttatagcccatatctattataaaatatccctctggtgaaaagacactaccttcataactttttagcaacagatcatcactggttagcctaaaatgagaaaaattatttatatatgtttcttttgtgattgcacttataccagcgccactatcaatgatcatctcata

SEQ ID NO: 14845 - DNA, 419 bp, Diabrotica virgifera
taacataaaaataaactcagataataggacagatcaggataatgggcaatgaattattttgtgaccaatttagatttgataaaaacttagatagagctaggttattgttaaaaaaacacttaaaataaaaagtaataaattaatttttaagctgctacgaaaagcatagggactagagtttaagaaaaatgaaaatgtatactaagttgaaaatcatccaccagataaggattttcttaagagcattcatagaaatactaaattaaaatactgttgtgatactggctgaggcttgaaattcatttaagaaataataccgtgtgtaataatgtgtttgctattatgtgaaaatataataactgttaactcatacaggctacatattcatatttgaatttccttacaatatcaatcacaat

SEQ ID NO: 14846 - DNA, 420 bp, Diabrotica virgifera
tagggatataattagtaacatttcaagctgcaccatcgcgcatcggtttaagcaaccggtttaaaaattcacatcacaaagcagcttcacaaattgcatatatgcctctaaaatgttgacgcttaacgttccagtgaagtccggttaaaccattatatctcacttctatacggtttcccgcgttgacattgggatcccagttgaagtagtagattggaagccgtgtagttttccatacccatcctctcccctttttggctcctgcagtccaaaatgaatattcggctccactcccatagcgttcctttaacttttcataaagaaagttattttcttcttgtgattcaatactgacgagatccatgtaaagagatttacaatatctccatgcttcccaccaacattgccgaacattatctg

SEQ ID NO: 14847 - DNA, 419 bp, Diabrotica virgifera
  SmartBlast Evalue=5E-57; Info=Exportin-2 n=1 Tax=Camponotus floridanus RepID=E2A3P1_9HYME
tatcgctatgaatttaaatcacaagagttgtggatagagattaagtatgtactagaaaaattggcacagcctctaactgacttatttgtggctaccataaatttggcacaaacccatagcaacgacgtgaatgcattaaaagttatatacagttcattggtgttaatttgtaaagtattttattccttaaattttcaagatcttccagaattttttgaagataacattcagatttggatgtcaaatttccatacgttattaacggcagatgtcaaatgtcttcaaaatactgatagcgaagaggctggtattatggaacaattgagatcccaagtatgcgacaatatagctctgtatgcacaaaaatatgatgaggaatttcagcagttcttgccacaatttgttactgacgtttggag

SEQ ID NO: 14848 - DNA, 415 bp, Diabrotica virgifera
  SmartBlast Evalue=1E-24; Info=Mariner transposase n=1 Tax= Bombyx mori RepID=Q1HPJ3_BOMMO
tacagttttaagaagttaaagctttaatacgagggttgtctttttagctttgcatatagccataaagacaaaaatatatagacttaaagtatgtagtactttatcgctcttcaaaataagtcccaccaagatcgatacactacgttccaaccaattggtaacacagttattccagtcttcagttgacacctgcaaatttgctgttttaaaggcatcgatggcttcattcggcgagtggaatcgctgcccacacactgaattctcgatctttgagaacgtgaagaagtcgttgggactaaggtcggggctatacggtggatggtatactaattcgatgttttgaagttccaaaaattctcttgtgttttaggcagcatgagcacttgcattggcctgatgtaggatgattcgctgt

SEQ ID NO: 14849 - DNA, 420 bp, Diabrotica virgifera
gaaatatacgtattgcttaaagtgtacaaaatgaacaaacgtttaactaatataatattgctaagtatagcatgtttactactatatacaggaacacaaacaatgagcaacattcaaaaaactatcattgatagtatagaaaagggcaacccatctttcgaagaaattgggtattatagccaggctattaataatgctttctatgctgtatttacttggacagtgccgtcaatcatcaacggttttggagcaaaatggtctatgtgcttaggtgctcttataaatttgttatttataatacaatttttgctggaaaaagtgtggatagtatacgtgttctgtggtttatcgggctttggttcagctttattgggagcagcgcaaggtaactatttgactctaaattcctcagaaagtacg

SEQ ID NO: 14850 - DNA, 412 bp, Diabrotica virgifera
atttcagattgtgtagtgtaaggttggtattgtatacagtgtaatgtagactaatcttatgatttaacgttgtgaaattgaagagtgttgacattttgatgcacatgatcagactttgaaaggttattcttgcatttttatgagaaaaataccttgaaaaccctgtacagtagttaagtctgttattttgcttgtatttcgttagaattaatacattgtgcaatgtaacaacactgcagtattgtaattatttattagaaatgttccaaccattagaaatgttttgtttcaccaaaatgtcgacattcttcaattttacacaaaaaacgaattatacatatttataaagaagaaattttgtcgcaatttttgagatttttgtgattttagtcagtaatatacaatgtatagt

SEQ ID NO: 14851 - DNA, 419 bp, Diabrotica virgifera
catttctttcataatttcaatcaatgttaaatgtacctacaagaataatagaataagaacgtttagttctccgtcattatactaggtagaatgacaaatgaggtgtcaaatgaaagcttataatccaaggatagtactaaaggtgagaaattagacctagattgtctgtgcctcaaaaaataagcgttatattggggatttctaatgtcgacattaaaagttgcactattttgttttctaaaaaacattttgttctaaaacttaccagaaaacttccttgtactctctactttcaaataaacgtgattaagaagctaaattttaaacttcgtcacacaacttttgcgattaaactttgcaatgcacaaatccgcaccttttttctttgaaaaatccataacctttatcatgataagatt

SEQ ID NO: 14852 - DNA, 410 bp, Diabrotica virgifera
agtaaaaaattcctccaacaacccatccatctgactcacttatatcggcaatgcagacacacattatacattttaaagtagaagacttcaaaatgtcattgccaacatttacgatccgcgtctctgggacgaccttcactgaaagatagttaattcgattacatgaaatcaaccccaactcaagaatatccgccacaaaaaaatcatagcctgtgatctgtcttcaaaaagacaaccaaacgcaacggcgacagcaaaactctcgcgttagagattccacagtaaatcacgaggaaataccaggaaaaaacctcgtgacaccatcccgacatcgcaagtatttggtcccaaatccagcccactctcaaaaccaacaccaaattctgacctcaatacacaatatacatgtt

SEQ ID NO: 14853 - DNA, 420 bp, Diabrotica virgifera
agtgacgtacccgctttattaacattgaacaatattaaataatattaaaataaagtaagaattaaataaaaatatgggtgtaacaatatttaatgttcatatttacaaatgactacacaattttttctataaatagcccactgtcacttaagacaataactctagaatgttcacttttagactggaatcttactttttactgacaaatgtggcattaaggtctttttcacagttcgaataagccattccaacaccaaatcctccacccattatgataggccatcgccttctcttgaaaaataataaggaaaatactgagcctaataccagacctccaccaaatttaagaactccatctgataaacatttatcccatttttttcccaattcctcttcaacatatacaggcgtcgccatttt

SEQ ID NO: 14854 - DNA, 419 bp, Diabrotica virgifera
  SmartBlast Evalue=3E-30; Info=Inositol-3-phosphate synthase n=1 Tax=Tribolium castaneum RepID=D6WV33_TRICA
atcgtagcaggaaagctacgtgttcgatcaacgtaaaccggtagtgtcgtcattgtatgcacttttaattaaagaaaaacatgagcgttgtggtgaacagtgataaagtgaaatatactgacaattttatcgaaacaaaatacacgtaccaatacaacaaagctagaaaaaatggggatgttattgaggttacaccaatatcagaaaagctagttctaaagacgtctagaaaaattcctaaactaggtgttatgctggttggatggggtggcaataatggttcaacgtttactgccgctgtaatagccaataagttaggtttaacatggccgaccaaaaagggatccaagaagcaaactggtatgggtcccttacacaagccgccacagtatccttaggtgacgatgtcttcgtgcctt

SEQ ID NO: 14855 - DNA, 420 bp, Diabrotica virgifera
  SmartBlast Evalue=1E-12; Info=Serine/threonine-protein kinase MRCK beta n=1 Tax=Camponotus floridanus RepID=E2APC9_9HYME
ggctatcgaatgacgtgggctacctctattttccgttccctttatcatttcatgcaaagacgacatgctaccgatactagcgggatcgggagaaggtgatttatcagatgatttgggcaaggctgggggtaaatcccttggtcgaggaggtgcagctcgttttgctccattgtgggcgggaaaattcggtctgataggagttgggttcgaaatttccggcctctttctttctccgtgtttcggcggtaatggtgcagtttttgttggtatcctttgaggaggagtagtggcagtactaaatggattatgttcgggtaactggtctgtacgtgtgggcgttagatctattaaccgctggcgctggattccatctcctggtcccatatgactgatatggttaaagttggttggagctgatat

SEQ ID NO: 14856 - DNA, 413 bp, Diabrotica virgifera
atttgataaagaaagaactgtccgaactttagaaatttgtattattataaagtattcaaaaatggtgcgacaaaccagagatcgaagtagaacacccgaaagaaaaagaaggaggtcgagatcaaaaagtaaagatagatcaaaaccgtcccgatatagaagaagccgatccagggagagggaatccagagatacacgtcgaagaagtagatctagatccagagaaagacgagacagggatagagaacgaaggtcttacagcagagaaagagaacgtgagagagatcgtagggataaggaaagaaggtgaaagattcaagaagaaaatcaagatccagatcaaaggagaagacccaaagtagatgatactggattatcttttgatccagctaatctggataaagaggaagaac

SEQ ID NO: 14857 - DNA, 418 bp, Diabrotica virgifera
  SmartBlast Evalue=2E-31; Info=DNA-binding protein smubp-2 n=1 Tax=Aedes aegypti RepID=Q16VY3_AEDAE
agtttctataatgtacaagaaattgagcagactgcggaatatatttcaaaattattctcaaataaagtaaaaggaatggcgattacagaggatcatattggtgttattgctccatacagaaaacaggttgagaagctgaaacaagcttgtgcacgaaaaaaatggagtaatttgctaattggatctgtggaacagtttcagggaaaagagaaactaattatcataatatctacagtaagatctaaaaatactagtaaatttgaagatattgacaagatgtgtaatctaggatttttaacaaatccaaagcgatttaatgtagcgttaacaagagcgaaggctctcttaatcgtaattggaaatgctactgttttgaaaaccgactcaaattggtcacatttcatacaatattgttcag

SEQ ID NO: 14858 - DNA, 413 bp, Diabrotica virgifera
  SmartBlast Evalue=9E-25; Info=Hsp90 co-chaperone Cdc37 n=1 Tax= Harpegnathos saltator RepID=E2BBM8_9HYME
atttagttcaagataagaaaataacagaataaaaaaaggattaagttgacgctaagattttgttaactaaattttacatcaagtgaagtttgtcgtttttaaaccacattataatttagtgtaataaaattaataaccggtataattttatcatggtagactacagtaaatggaaaaacattgagatctctgacgatgaggatgagactcatccaaacattgatacaccgtccttatttcggtggagacatcaagcaagagttgaacgaatggaagaaagaaaacatgaattcgaaaatttagataaaagaaagactgaacactctaaaaaagctaatgaactcaaggaaaagctaaaaagaggctgaaaaaacaaatgctgcaaatttagcagagctaaaaaaatcctttca

SEQ ID NO: 14859 - DNA, 417 bp, Diabrotica virgifera
  SmartBlast Evalue=6E-27; Info=Mannose-6-phosphate isomerase n=1 Tax=Camponotus floridanus RepID=E2ARN2_9HYME
agcaaacatagaggttataagaataaaacatttttgaataaaggtgaaatcggggttaccgataaagaactaaaattgttgcctaaaaataatggaactggtctgcgaagtgcaaaaatatgactggggcaagcgaggtcaagaaagtaaggtagcacaattaattagatcagcaaatgaacactttcaaattgaagaatcatcaccatatgcagaattatggatggggacccatgtaaatggaccttctctagtaaaagaaacgggccagcttctatccaaatacataagtgaacatcccagtgttttaggagaaaaggtagcagcaaaatttaataagcagttaccatttttattctaaagtttgtcaattaacaatgctctgtctatacaagcacatcctacaaaagaatttgc

SEQ ID NO: 14860 - DNA, 414 bp, Diabrotica virgifera
ccatcattttaaccctgcatgtggatggacactttctattgcaaattaaatattttaaactaaaaaataggttaataaaagaaataaaaaaaaattaaaaaaatcgttatcagtgatgtcattcctggtttgtacagagtacggtatcttatacacacaattttatcattgaaaaaacttcgtttggtacttccttgataagtcactacaactagcttcactctttccatgttcttaaaagtcctatattataggactaatccaaagacgattatgtccataataactgaagacctaagtggaagaagcaggtatgtcaaattttctaaaattctgagtttcctagtgaatgaaggtgatacctctatcatatgaaacttacactgtaccactaaatgttatagtcggttcgct

SEQ ID NO: 14861 - DNA, 417 bp, Diabrotica virgifera
  SmartBlast Evalue=2E-40; Info=Cytochrome P450 n=1 Tax= Leptinotarsa decemlineata RepID=Q3I414_LEPDE
tttcctccgattgcaaacagatgagcaccaattggctcatctttttcgttaacataaaaccctctatccacaaaatggttaaagtccttggttaaaacatgttttaaaatatttaaatctatagggagatatattggtgaaaccatattgtacagtccaacatgtttccatcctttatctttacccttctggtacagctcggctaactcatctccaagaggaacagttcttttatgtggtggactaagattgccccaaataaattttggttcgaaataaggtactcctttgtttttccaaaactgaaaggcccattttgaatataaaattgctaacgttgcaaatcctatgacaacaccaaggagctggtataaaatagcaccggttatgatagacatgtttgttttgtttatctat

SEQ ID NO: 14862 - DNA, 417 bp, Diabrotica virgifera
atttattttaaaataataaaatattttttagtaaaagtaaagaaaaattttatttaatgatagttaattagtattgtgagagaatattttatttttataaaagaaaaatttattttttgtaccttgtgtatcagggattattaattaataattatatatttattattttcgaatttaaaagagctaaaaaattaaaatttttattgtaaaataaatattttaaataatttttttgtaatgaaatgttattcgtttttaaatatatctaattttttaagaaataaattaaatttatttattaacaatatatttataattaaatatttttatattattaatattaaatatttttagggatgagcttaaaaaataaaattttattaaaatttaatttttaaataaaaattaggattaaaa

SEQ ID NO: 14863 - DNA, 418 bp, Diabrotica virgifera
  SmartBlast Evalue=3E-11; Info=U3 small nucleolar RNA-associated protein 6-like protein n=1 Tax=Camponotus floridanus RepID= E2AAN7_9HYME
tacctagattttttaatagaagtaaatgaacagaaagatataacaaaccacatgattaagaatactctaaaagaaaagtttgaagaagctaaacgtgcttcagtattgaatgaaaggtactatttgaattgggcaaaattatatacagaggaatcagatatgttacaaatcattgaggatggtttaacagttcttcctaattcagtggaactgtggaaaatgaagttaagatgcatgataatgcgagatgatacaaaagcgttaaatgtagaatttaaaaaggcacatatggcactcaaggaaaaatctactccactctggataattcttataaaataccataccttgtcttccccagaaaaagttgttgaaactatctacagagaagcttgtcagcaacatggatcaatagctaatg

SEQ ID NO: 14864 - DNA, 419 bp, Diabrotica virgifera
ccgttgtcaagtgaagttatattaaatatatttataataatttatcctatcgtcatcatgagaagtttaatagttgccacgattgtacttttcgccgtttatcaggcagtagatggtctcattgcctgtcacgaaaccttttgcgacaatcaaaaatgtacagaaaacctcgtttgcaaagattctgaagttctggttcccaagggaaccatttgcggatgttgcgacgactgctacagaaaactaaatgaaggcgatgcctgcaggtcacgttttattggaggaggtccattcagaggaaaatgtgtagatggattagtatgtaacgctgaaggaaaatgcgccaaagcctaaattataaacaaacactattatgtagataaataaacgatttcaatgataaattatatgctattttt

SEQ ID NO: 14865 - DNA, 413 bp, Diabrotica virgifera
gtaacgcaaacaaatcaagtagttatatgataaattaattgttgttgatacatttatattttcaatattacaattattaaaatgaatttgatgatcaatttttaatatccctatcgtcttaaagctttttcttaaaggatttcatttttagatttgtcaatttatttaaatattgagaaatatcaaagcttatgtatttgactcgacattggtcactgcgcatgtgccaccttcatcgccaatgtcatctcgcgattatattggttaaaaatctgtatcatattagttttgttctagcatcagtttcaaagggtttgaaaccatcagcgaatagtggaccagcgcgagtagaggggatagcactggtgactgtattatgttctctcactgaccaactgtttgctgacggtttc

SEQ ID NO: 14866 - DNA, 417 bp, Diabrotica virgifera
caatgactaatacaattgttattttagttttcctgtgctgtattatagcacacatcgaatgtaataaaacctttatagagtgtctagattctaatgataaaggagaactggcctttgtcaaatcaagaacatcaagtcctgtagatcaagttatccgtgaacacattcctgcgagtatgtataaatcagaaatttcttgtataatgatactccacgataatcataccacaccggccgtaattaaaggaggacttcgatttaagtatgtagtaattgaatttgattttgatttgttactagaatcaagctatgtgattttcatttatactttagaggaagaagattcatctgtttaaattacaatctaaaatagtttaataagaaattgttagtttgaaattaataaactgaactaaa

SEQ ID NO: 14867 - DNA, 417 bp, Diabrotica virgifera
tattcgtcatccttaaaactatcattcaaaagcgtatccacagaaggtacaatattatctaattctaaactgtctgcgcccaaatcatccaaaattatatcaatcgcatttagatcaagtcatgaatcggcggcttcttgtgtagtaggtcataactcgattgtaacaatttcattactttcatctacatgtgcatcacatctttccaatattagggatggatgtaaattgaaaagagtacctagtctctccgcagacatatccagatgcattccgttaatttccacacttgacataattttatttaagtctacatcttctacggtatttccataaaagctaaattcttccataggaagagttgaaggtttcgaagtggattttctcgctgtatgttttttaattactgctgatgga

SEQ ID NO: 14868 - DNA, 417 bp, Diabrotica virgifera
ataagatgcaaaattatttgtaaagtttacaatttgttaatttaagtgttgtattatttatttgtatactatgtttactaattagacgaagaaaaagaaacatgacagtgatcaaggaaaaaaagaactacaaatatcctactcctaactctgctgcaggttcagatacagaatctctacatttgggaagtgtatcagccagtgatgcagaatctgttaatgaggagccactgcaaaacaggatcagaatagtgaagcctaaagtaattaaaccatctcaggttgaagaattggctaatttgaaaaagaactctggaagaaagaagttaagaagataccagaatagatgtatcttgcaaacattaagcgaggaagatgaagaaaatgaaaatatggttgtgattatggagaaataca

SEQ ID NO: 14869 - DNA, 414 bp, Diabrotica virgifera
taattttttatctggatccctgttaaggcgtaatataatggaccatattaaaaatttcgtaattttactgagaacaaattgttctcatgtacacacaagtacgacaattgattattactattatttattaacagtcaaatgtatttgtccaaatgctttaaaatgatacagtatttatgtcaaaaaactttcttggacggagaaaaaacctccaccaaaaacattagcgtgtgcgcagcgtacatactggatataggtctccggcccgggagacattttgaaaatttcattttggcccgcgcttaaaagtatttgcccacccctggtctaaagacattagacaaacaacaaagtagacaatctatcgaaccttggtagggcctattatgatttatggtaagtagtaatggatta

SEQ ID NO: 14870 - DNA, 417 bp, Diabrotica virgifera
ttttttggtatagattatatttccagaagccggtggaaactgaacgaatagtttagcaataattaaattgttaattaacaatttacggtcgcaacaataacctattttctaattggtgttttagataataattcctctacaggtacatcctatttgagtttttgttttcctatacatttgagacttcaaatgtatagaaaaaatttgccaaatgcttctctgccatacgagtaattacatgatggggtacatggctcaaacctgcaaattttattctgatcatttcgtttcagtaaaagaattactaatggattttgacgatagagggttttaaaaaaaggtttattaaagtcagaattaacatgtattaagtttaactacgaattcgtaagcgatattatttcaatgcaagaacat

SEQ ID NO: 14871 - DNA, 415 bp, Diabrotica virgifera
accaaaaaaatcaagcacttttcggggaaaactcagattttttaaagtatttgaaaaaagcttttttgtattaaaaaaaatttctaacatcaaaagtaagtaagttacgatcaaaagaatgttggtccatttttttgttggtaaaaaaaaatcgtgaaaatcactcccaattagcatccaaaattaaattaatcattaccacttcaaaaattactttacattttattgtttataacatctgtaagattaatgggtttaaagtgcttatttttgaaaaggctgcagttaaatgggcttaaactagtaactaatcacgagcgtatgcaaattttgaacagccatatcttaaccaattttttgtttttaggaaaataaaaagtccaaaatacaatagcaaaacctataatataattac

SEQ ID NO: 14872 - DNA, 413 bp, Diabrotica virgifera
agcccatgagaagttgattatggggattaaaatataaatattactcatttttcatgttttgagtatccaactatgagaattattctcgttaaaaaaacaacacatttttctatcttaaaatgcaatgaaattttaaaaaaatattagacttgttaatgatgttcctgagagaagtgtaaaactgatgcaagacatttcatttccctcacaaaaaatgaaaaagcaagcaaagtgtgttacaagtacagtttggccaaactgtttaaaaacacagaaagtattttaccgatttcagaaaggcaaacttttaattaatctttaaaagaaacttttactgatgtagttaatattttcatttaaatcaaattgtaacagctttgtatattcctttatatccaaatgtataattagtt

SEQ ID NO: 14873 - DNA, 414 bp, Diabrotica virgifera
atcgaactggaatgacaattttttctgttaagtacaggtatataaacatcgtagtttaaatccatttttgtttattttaaatcttatttaaataaaaatgtctgcaatttttttttcgcaaaaatgctacatgtttgaagggcggctactatagaattgccaagggcgtcaatttacctaaacgcggccctgaatagaaatgagtcgaatcgaatagacgtcagcaatcggattggaatttgtaattttttattttttaatttaattgaatttaatttaatttgaatttgaaaattaataattgattcattttgtagctgcttaattttttagtttgcggtgtaatttatttaaataattgtatatttaatttagacatgtatggctatgcattgaacctaacctaatcttcat

SEQ ID NO: 14874 - DNA, 415 bp, Diabrotica virgifera
taaacaagtaagtccgaaaagtgaagtcattttacttactttttgacgaagaacagaatatcactagatgatgcacttttctttaaaacctagattaagttttttcgtgaacaaacacacaaaacgaaaagatatactattgcagaaagtattcattaattttaaattgattatttcaagatgtgttgttattctgcaaacaaacaatgttattgcctgtaaggacttgaagcaactggtagtcgtcgattgttcatgaaagatggtgccgaaaatcaaccaatcacataatgacattttgtggcgccacgttgccagttttcgagatacgaatgtgagatttatttacaagatagtagaggccgctttggatatcgctgtgtgcttaactagaaaatgaactattttggattgt

SEQ ID NO: 14875 - DNA, 413 bp, Diabrotica virgifera
cgtatgcaagatttcatgtcaattcaagcggttttttaaaatttagagcaaaaaccgtgaaagaatgtactacaacagactcataaaacacaggttaaaacaaaatacatgtattgaggatatttatataacacagtacgctggacacttcagtctacagtgtttcccgtgccaatgcatgcgttttaatgtacgtaatctacgtagaaattgtctgtatgcgcgcctactcgttcgatttcaaatagaaatgcattgaaaacatcattcaatcactatgtgtttatagctttgtttaacaataaaaaatcaatttgtagcaatgaaataatcaaaaccgatagaatttgacttgaactttcaaatgcggcaagcagaattgctatttatccttcaatcaaaagtcattcggg

SEQ ID NO: 14876 - DNA, 415 bp, Diabrotica virgifera
ggacaaggatgcctctttccgacgctgtcataatttttttgacaaaaacgaaatatatccaataccgatgtggttgctaatataattcttcatttggaatctatattcaagaatgttttaataaatatttctctgaagtttattccaaacttgactgaatcagaaatcattttgcaggaacactaccaaatgagaattacacgttttacaggaaatattcatctatttcacagaagacagttttaaagagaaatccttaattgacttctggataaaatatacgggaccggatagctcaggcggtagatgtctgacttccaagcaggtagtccgggggcgaaaacatctagacatatttaaaaaatgtctataggccccagatcgactcagcctgaataaaatgagtacttgggta

SEQ ID NO: 14877 - DNA, 416 bp, Diabrotica virgifera
attttttatttattttaaaataataaaatattttttagtaaaagtaaagaaaaattttatttaatgatagttaattagtattgtgagagaatattttatttttataaaagaaaaatttattttttgtaccttgtgtatcagggattattaattaataattatatatttattattttcgaatttaaaagagctaaaaaattaaaatttttattgtaaaataaatattttaaataatttttttgtaatgaaatgttattcgtttttaaatatatctaattttttaagaaataaattaaatttatttattaacaatatatttataattaaatatttttatattattaatattaaatatttttagggatgagcttaaaaataaaattttattaaaatttaatttttaaataaaaattagg

SEQ ID NO: 14878 - DNA, 414 bp, Diabrotica virgifera
  misc_feature (9)..(9): n is a, c, g, or t
ttaataacntacctatatttcaaagtgcgaatttggtaaatttttctagtccttagccactatgatttgatagatgtaactcttatgtacggatggatattttttgtaaatgttatttattactagttttataagaaaacatcgttatgagtaacttctaaatcttacagagtatcgtcggaaatacatttatctgaataatatatagtgtagatgtgaataatatataccaatttagtaccaagaagaaaacattgcaaaactacaatgatatctgttagttaaaggtttcctgttttatatgttagtttagtgcaaggggatataaggattacgccatattttggattttagtcagatcagaaaaggtcatttattatctattgattactttaaagtgcactaaatataatt

SEQ ID NO: 14879 - DNA, 415 bp, Diabrotica virgifera
  SmartBlast Evalue=9E-62; Info=Nejire n=4 Tax=melanogaster subgroup RepID=Q9W321_DROME
atacttttaatccacaagttttatgctgttatggaaaacaactttgcacaattcccagagatgctaaatactttagttatcagaacagtagtctgaaggcgtatgggctagcatctgacaggtacactttttgtcagaagtgtttcaatgaaattcaaggagacactgttacattaggggatgatcctactcaggcccaaacagcaataaaaaaggatcaattcaaggagatgaagaatgatcatctggaaatggaggactttgtaaattgtacagactgtgggcgtaaactccatcaaatatgtgttcttcatatagaagcaatttggccgcaaggttttacttgtgacgagtgcaacaaacttaaaggacaaaagaaacgagataataaatttaccgcgaaacgactacctcc

SEQ ID NO: 14880 - DNA, 415 bp, Diabrotica virgifera
attaggacgacgataattagtgtagtgagtctatggatatggaggtttgagttttttcatccctattgatccctgatcattgaatctagaacatctccaaattcacaatttcttgccaatcacattatttttagatgtgaagtacttctccaattcagctaatactgtatcatactattttctgtgcgcatcgttagctttaaggtgttaaacacattaagtccttcttctcccaaaaatttaacagtagaatatttttactgagtcttccttttctgccttgccactggccaggagctaaatttcaaatgtctgtttgagtcgccacgttttcagccacgttaccttcaaatgacgatggttcttttctttaagtgccatctcccaatcgaaggttggatatcatcatcactat

SEQ ID NO: 14881 - DNA, 405 bp, Diabrotica virgifera
gcggagatgaagcagttgagaaaaatagcaggaaaacaaattggacagaataagaaatgaggatattagacaaaggctaaaacagcaatcaataataacgaagatccaaaaaagaataaattggtatggacacattaaccaaatggaccagggaagactaccaaagcaggtgatggaatcaaaagatatggtaaaagaaggaaagggaggccaaggaagagatggatcgatcagattatagaaattggacaggaaaaagagaaaacacatcaacaaatgaaagagttagcaaaggaccgcaagaaatggaagatatggatagaggatgaataaaacctccgacgcccctgaggggcataaggagtttcgagaaagaagaagaacacaatcattattacaatcact

SEQ ID NO: 14882 - DNA, 413 bp, Diabrotica virgifera
ttaggccacaattgacccattgtgcatcctcccagggagctatcgtccttagctcattgtccatcctgtcattttcagaaaggtggacaagcatcagaagatatatcttttatgtgggcaggtgtaggttagggctcgtcgaaaacatactctcgtattaacgataactccggacattcacgtataacatactcgacagtttcatcatctcgttcacacttcttgcatagaggtgtgtctactagccccagtgtatggagtatttgcttagttgacaatggccacttaaaaaaccaactggtcaagcgtagtgttggaaaactctcgagaatgaaaaattagagaatattctcgagaatatttttgatatggagaattttctgagaatgaaccccatgacgaacttaggaata

SEQ ID NO: 14883 - DNA, 415 bp, Diabrotica virgifera
attggatcgcggtgatcggtgctatttcgtgataccgccaagaaaaccaacagtgccaaagtgcgcgagtttcttctgtttgtgcacattgcaggaatagcacttctaggatacacttctaggattaaacgggggatgagagaatagaagcaaataaaaatgtcgcaagttgaacggaaagagtaccaagaatcgaaagtaatgaggacagtgtcacctgctcgaagaaactatagctcaaatcaaaatttatcccaattcgatagcaacttagattacctccttgaagaccttcaaaactcagtatctcgtccaggaagttcgttaggatacaacagtagtggaagtcatacacacagggaaacttcccgtgttgtggatacaggcagaagtaactcgttgaatagaatcgccc

SEQ ID NO: 14884 - DNA, 410 bp, Diabrotica virgifera
gtttgtactaatcaactaataaattaattgataacatgattgattttaagactaattggcccaacatacatacacaccttgtcaaaaaaaaaataaaaacaggaagtaatgaggaagatcagttttttaatggtgaattctccaattcaatattctaggagatattagattattgaaattatagattgagataatattagattgttgttatttatcatctttttgtcaattatgtaagtcattgacatgaccttgactgagtgtatggatattttattaagttgaatccctaatgtttatagtagaaatattaaatgattttattaaatgctaagatgtgcctatatgatgctaagattttcctttcaatatgttaaaaacattcatattccaatgtcagctgtcaaacg

SEQ ID NO: 14885 - DNA, 414 bp, Diabrotica virgifera
tacatgttagtagtgtacaatttagggtttccgccgaaaaaaaaagtagaaaaaaggcctatgtacaacatattaaacaactaaaaagccgtaacagtatatcttacaaaataaatatttaaactaaatagttcaagtgtacttagaataaaatattcataagaataagtgttattatattagttgacaagtttacatacaaatcttgatgtatggaggctctactaaggtttagattagaggtggaaattggagatacttttacagccaagtccatatctcaaggttttttatatgtatgatacaaaatcaacacaaacaggtcgactaatacaattgaagcatacaggatgtgccattaatacggatgaagggagaatttaacaaaatcattgttattttggtcttgttttt

SEQ ID NO: 14886 - DNA, 415 bp, Diabrotica virgifera
  SmartBlast Evalue=2E-45; Info=Acetyl-coenzyme A synthetase n=15 Tax=Drosophila RepID=ACSA_DROME
agcgcaatcgttgtcgacagacggaaaacaatatagtaacggagattgttgactagtaaaactcgggtttaaaacatgtcttctgaaaaatcagtgtatcatccgcacccttcggtgtcaaaaaatgctcacgtttcaaatttttcccaatacaaagacatgtaccagttatccattgacaaacccgaggatttttggggcgaaatcgcgaaacaatttcactgggaaacaccgatagacaacgacaatttttttagatataactttgatgttaccaaaggacctatttttacgaaatggatggaaggtgcctccacaaatatctgctataatttattggatagaaatattagaaatggtcatggtgaaaagatcgcatattattgggaaggaaaccatcctgacgattacagca

SEQ ID NO: 14887 - DNA, 411 bp, Diabrotica virgifera
cctctcagaagggatgggacgaaattataaaagaactgacagcatcagatgcaggtggtcgatttcaaaggtctgctttgtcagcatctttgacaaatcaaaggattcaattaggtatctctggcaaaagtccccatgacgtttttctaggacgtggtacaatttccttttaaaggaaaatttaatgaaatctataggtcttgtagtttaacaaatgaacaaagaatttttactacagggtcagccgttctagcagaaccgtagataatagttttggtgttctttgtaatagattccgtatgttacaagacataaaaaagtcgacgttgaaaagtttgtacaattacaaaggtatgttgcattttacagaattaccttttaaaaacctcttcagtatatgctgaaaaccag

SEQ ID NO: 14888 - DNA, 414 bp, Diabrotica virgifera
aacttaggtagtccgaatgtcaccactaaaactgaaacaaccaaggaaaagtttgttactacgtcaaaagaccatactgacactataaaaaaggaaactaaaacagaaactactaagaagattattacaacacaaacaacgtctactactcagagtgtaacaaaaacaacttctgctaccatagaatcagatatagctgctgcaacacctgtggtaattgaatcaaccttgcaacctattgacggctccaaaggattttttaaagacggaagttgaaaaatatcatgacgtgaaaccaatcattaagtcttctgatcaactacaagaggagttggttaagtcttctgaaccaatactccaagaagctgttgatgtcaaagtagaatcaactccgaaaaaacagaagaagatggt

SEQ ID NO: 14889 - DNA, 414 bp, Diabrotica virgifera
  SmartBlast Evalue=2E-24; Info=Chromodomain Y-like protein 2 n=1 Tax=Camponotus floridanus RepID=E2AL24_9HYME
ggagtgacgatgttgtctttgtttgacacagttatagcaagcgatacagctaccttcagaacgccctatgcaagtctcggatgtttaggggaagcaacatttttgctgacgtatccaaatctaaatagtaatggattggctgccgaattattatatgcccaacaggttttgaaagcggatgaagcgttcagacgtggactgatctcaaagttgtgctggcctgaaaaatacaaggacacgctaaataattttttaacttcagtcgcaaagggatcgagacagagtctggaggcgactaagagaaggcttcgagtcaacacaagggatcaaatagaagcagctatcaacgacgaagtcgagatcctgatcgatcattggacgagtccagaatgccaggaaaacttctccaaactc

SEQ ID NO: 14890 - DNA, 406 bp, Diabrotica virgifera
  SmartBlast Evalue=2E-40; Info="Sarcosine dehydrogenase, putative n=1 Tax=Pediculus humanus corporis RepID=E0VHM0_PEDHC"
gtgaactttgcccagaatttgtaaaaagctggtataaaatccgacatttgtggtccagagtcatttacacccgatcacaaaccaatacttggagaagatccaaaatgtgtaggtttgttccatgcgaatgcttttaactcacttggaataatgctgagtggaggtgttggagatcagctagctaactggatagtctccggtcgtcctgaattgcccctctacgctttcgacatcagaagattcacgccagtacaaagacaagatcgcgcttgggtcttggagcgaactcacgaaggatacgcaaaaacctatagtataacttatccacaagaccaaccgttcgctggaagaaatcacagaactgaccaatttcatgaggctcttgtagcaagtggagctgtcatgg

SEQ ID NO: 14891 - DNA, 408 bp, Diabrotica virgifera
aaatccagcagcaataaacccaagcaacagtttaaaggtggcaaagttcgacagaggcctaaaaaacttaacgaagatcccacatttagtacaagtttatcaacccccattgaagatataatagaggaaacaatcaatgaagaagcagtagcagttaataagaaaaaaggaaaatcatccaaaaagcaaactgaagaattgccagtgaaaaaggaaaaacccacaaaagatctagatgatgacataggttattcatttttcaaagttaaaactgtttccaaaggaaatccagaagccaagcctaagaaacaagtttctgttgacctaaatgaagataacacagcagatgatataggtttctcatttttacctgtcaaagaaaaaggcaaaaaatagaaatctaagagt

SEQ ID NO: 14892 - DNA, 413 bp, Diabrotica virgifera
gtgataatttgcacattatacatctttactggctatcgtaatgaaaatttcaactactttatttttgggtttactgttcactgcagcagtggtaagctctttttcatttgatgatgatttcgaaaaatatcttgacgagtgtaactcaaatgatgctacaagaattgaccgtgacgccttgaacaaagccaaaagacaagaaaaatttaacccagatcagttgtctgcctatcttaactgtatttttacaaaattcgaaattcaggatgaaaatggagattataagcagcaaagattaaatgattttattaaacatgtagtcagcgatcaaggaaatgttgaaacaattatcaccaattgtggaacgagacctgagggtaccactgcaaagattgcagccttacatttgcttg

SEQ ID NO: 14893 - DNA, 409 bp, Diabrotica virgifera
aaccgattacttgaagttgttaaaatgccaaaagatagatttaattaaccattcagatgggaaacaagccacaatcaaattgaaaaaaaattttattaacgtttcgacgcctaaatcgggtgtcgttgttgaaatacaaaatactactaaattaaacaaaaatgtggttgcttagtaaaaagttcttctaatttatttaatctgactcatttatatcggcaattcagacatatattatacattttaaagtagaagactttaaaatgatattgccaatatttatgcgttgcgttcctgtataatattgctaataattccttaataaaattatttttttcaatttaattgtggcctatttcccatctaaacagttaattaaaaaatgccacaagaaaataagcttcagaac

SEQ ID NO: 14894 - DNA, 413 bp, Diabrotica virgifera
  misc_feature (27)..(27): n is a, c, g, or t
  SmartBlast Evalue=2E-38; Info=AP-3 complex subunit beta-2 n=2 Tax=Formicidae RepID=E2BLT7_9HYME
ctgattcatcaagtgtttagaaacttntgtgccttgttggtagacgtggatgaatggggccaggtgacaattgtaatatgcttactcgctatgctaggaaccagtttgcagatccaaaccttcaagaaaataacgaatctgataaagagttttatgagtcaaactctgaagcctctgaaaaccacatacctagtttggatccagatcatcgactgcttctaagatctacaaggccattactgcaatccagaaatgctgcagtggtcatgtcagttgctcaactgtatcatcatgcttccccaagaagtgaaagtatcttagctgcaaaatctttagtgcgttttctgagatctcatgttgaagtacaaagcatagttcttaatgcaatagcatcaatgagtctcaccaacaaa

SEQ ID NO: 14895 - DNA, 415 bp, Diabrotica virgifera
aagtagcaaacattttaacaactacaatttgttaagattttgataatttagtgcaatgatgtgattttttgctagtgtaaactcagtgcgactgaaggtcttcgaatttacaaaaatggagaaaacttctctcttaggtaatatgaaaaccaagcaaccacccgtgggatcccccatcatgaaatccatcgatcccaacatcaacaacaaacccgaatataacaacgcatgcggggacaagttacctgaaggccttatgtcgttagatgtaaccgctgacatagacgatgagtacaaaagtactctactacctcgacgacaacgaaaccttaggatacattcggaagaggaattcctcaaagctttgaacattccaccgaatgaaaaagttaaagtggtgtcaattttcggaaat

SEQ ID NO: 14896 - DNA, 413 bp, Diabrotica virgifera
aaaggatttagaaaattatgtttaatacagtgttatagaacttttacttagctttgtaatggtttttggataaatctcatatttcaaaatttaacggagttattttaaaaaaaccaataacattttctttgaaaaaatcttatagcggagattttgtatgtatccaggttgtgggaagtccaattagtcgtttgttgtaggagatacgaaaaaagtttatttaggtgagattggggcatagataatatcagaatttaaatacatttccaaatatacagggccacccatattgacagggtgaaacaaaattttcttttgtttaatggaacaccctgtatatttttacattttttggattctcctctatgttttatttcttaaaatatcaggttttgtgatgttatacgaagtag

SEQ ID NO: 14897 - DNA, 409 bp, Diabrotica virgifera
ttgatatccgtatcgacttttcacgtcaaaacgggtgaaaataacgaaaaaatcagtaatgtacactaaaatcacaataaaaatttactagaaataaacaaatcaagacacgtcaaatgttaccaggagcactcccaaatcatgacaacgtatatacagtgcacagattgtaaaggttccggtggggggtggcgtatatgtgcagtactatagtcggttatgagagagaaggcattcgaaataatgaaataacaaataatataaaatatgttaattcattatttcgaattccctctctctcacacaccgactataaactgagcatagacgccaacccccaccgtcacctttagaatatgtgcactgtacattgtaaatcccaaatattgatttataaagtttatacatt

SEQ ID NO: 14898 - DNA, 412 bp, Diabrotica virgifera
gtgtcacgtgtcacttaacttactttttgatagatttagagctcactgctgaattcagtgattttaaaattagctagaaaacaaaaaattaatttaccatgtctggggttcgagcagtcacaaaattagccactactccaggccccattggaaagaaacacatagaaatagcccaacaatggatcggatctgcagcagcctttggtgcagtagctggtgttaccttatgctatgtcactgactggagggtcattgtcgattatattccttattacaatggcaaattcaaagaacaataagctagtgattgtgtaccaacgagatgttccagggagttcagtaatagataaatatttattgaaataaataagttcttgtagatacgtgccattatacgttttatctgtaaaaa

SEQ ID NO: 14899 - DNA, 412 bp, Diabrotica virgifera
  SmartBlast Evalue=1E-10; Info=Probable RNA-directed DNA polymerase from transposon BS n=1 Tax=Drosophila melanogaster RepID=RTBS_DROME
acatcttgactcaaaactcaattgaaaaatacatattctttagaagaggaaacaagttgacctaagaatgaaagatataaactggctactagaaatgaccctagaaaataaaaaccttgtctacaaagccgttataaaatatatctggacgtaaggaatccaactctgggaatgtgcaagcaagccaaatacagccataattcaaagtagaagccaatcgaaaataatgcgaacaataactgatgcaccctgataagtgtcaaacctaacgcctcatgaagacctaagaatccctttcagacagtatgtgatcactaaatatagcactaagcaccatgaaggactggaatcacacagtaaccccctacttcaatttctaatagaacatcatgccaatagaagactcaagatc

SEQ ID NO: 14900 - DNA, 413 bp, Diabrotica virgifera
  SmartBlast Evalue=8E-29; Info=60S ribosomal protein L38 n=4 Tax= Endopterygota RepID=RL38_LYSTE
cgcctgtaatttatccttctgtttataagcttctcgaaagtgacttgtgtttctgaatttatttcagaaatctgaaatcatctgattattccgtgaagggaataataaattgaggaaattattattttcctcgatattcgtcgcgcctaaaaatttagttagtccaagaaataaccatgccacgtgaattgacagaaattaaggaattcctcctcacagcaagaaggaaggacgccaaatctgttaagataaagaagaacacagaaaacaccaaattcaaagtacgttgctccaggtttctgtatactttggtgattacagataaggagaaggcagaaaaactaaaacaatcacttcctccaggtctccaagttaaggaagttaagtaaatgactataatgtagaaataaaaa

SEQ ID NO: 14901 - DNA, 408 bp, Diabrotica virgifera
  SmartBlast Evalue=3E-14; Info="LINE-1 retrotransposon-like element, putative (Fragment) n=1 Tax=Aspergillus flavus NRRL3357 RepID=B8NZ53_ASPFN"
taaactcttcattgtcttgctgtgtatcccccattatcatgtatttagttttcttttcatttatctttagaccaaacctatttgcttctttttctatctttttcacaattcttttcaattctttctttgattttgctaatattgttagatcatccgcaaaagcaatacattgatgttcatttttaaatatggtttcttccatttttatgctgcaattcctcattattacttcaagaacaagattgaacaacgtggttgacatcgggtcaccctgcctgagtccttgtttgatttcgaagtcctctgagatgtctttccacactacttcgcttttcgtttttgccaacgtcatttcaatcaagctaatcaaattttttggggatttgtagttgtttcagagcacggtac

SEQ ID NO: 14902 - DNA, 405 bp, Diabrotica virgifera
atttgtagccttgaatttttaagtttcctgatattcatccctttctttttatatatacccgacctatgacaattatagtttgttgtggtacagttactggttttctttgaaccatacatttttacaaatgatgagaatgtttcttcttcaaccttgcatttccaagattcaaaatcttcaaaagtatcaaattccagataattattttcaatgttaatgaaatggtcactcctataatgtaaaattaaattttctcgaccagaattattatattgacacaacgtgcactttaattttgttaaggcattattatgagtttgtttatgagaaactagtttttttaaattatgaaaactttcagagcagctggaacacacataagttttcttgttaacaggtgctatt

SEQ ID NO: 14903 - DNA, 408 bp, Diabrotica virgifera
aatcaaaattagtgaaaatgacgcttctttttcaattgtcatttgcacctagaacattggcaactatggttggcaacctaattggtctgcaatatgcaatccttcgaaataattattatattattcatattcatattataaaatccacaagaaaaataaattccttgtaactggctgcccaaacagcgcaagtacatccctgggacgtacccgggatgtgtataagtttaatcaccaaaaaatactaaaatcctttacaaaaggcactctctatttaaaatcccttaaagggctacagcacagaacgttttagaactaaaaagttcatcatcagtgcgttttagaggtttttgacacgcttgagccaccaagatatgtgggtgaaaacactttaaataccatacaacc

SEQ ID NO: 14904 - DNA, 412 bp, Diabrotica virgifera
  SmartBlast Evalue=2E-32; Info=Signal peptidase complex subunit 1-like protein n=1 Tax=Triatoma matogrossensis RepID=E2J7F1_ 9HEMI
gtgacgttttgaatgtatgtttttgaaggattgggattgacattttatctccaatatacatacgtggtctaacatttatttttcaagtaaaataggaataaaacatggatttcatcaaccgtatacctacccatatggactttgaagggcaagccagagcagaaaagttatctagaattattataacactatttggagcagtaggtcttatttggggctatattatacaacaattttcccagacagtatacatcttaggagctggatttgtattagctgctttgttaactattccaccatggcctctatataggaagaaaccattggagtggcagccagtgaagaataatgataatcatcctaaagagacttcaaagaagggaaagaaaaataaataatactatttatgcat

SEQ ID NO: 14905 - DNA, 411 bp, Diabrotica virgifera
taatcatatgctatggaccagatgaagacgcaacaaaaaacgaaaagaatgagttctgggacaaattacaagaagtgataaatgattgtacagagaaaatggtgatcacaggagacatgaacagtagagtggggaaagaagcagaaaaatggaacaatgtcatcggaccgtatggggaggaaaaaataaacaaaaaatggaaaattactacttgaattctgtctagacaataacctggtgattatgaacacacacttccaacataaaaggatacacaagatcacaagagaagtcaaatcaagagacgaacaatcaattatagactatactatagtgcaaaaacagagaagaactggataagagacgtaagggtgaaaggagttatgaaattggtagtgaccactatctact

SEQ ID NO: 14906 - DNA, 411 bp, Diabrotica virgifera
caactaaaaatttatattacaattgtaaactataacaaaaagatataatatcagcttttgggtctcttgagtcttttagtgaggatgaattactgggcctggagcaagtggaagtccgggatgagtaggtccatttgagttagcatgagctcccagaattttgcgatggtttctccctgtgtcagcgctgcttaagtctctgtagacgcgtccagttcggcggcctggatttaaaccagtagcgtggcgctgatatccattggggacaataagtccagttgcatggggttggcgattttgattggggttgaatccagtagcatgttgcgcagatgctgcttcaaggcatagatatacggccaaagtggccaacaacaatttgcacatcatgattaatgattataaagaatg

SEQ ID NO: 14907 - DNA, 402 bp, Diabrotica virgifera
  SmartBlast Evalue=1E-19; Info="Reverse transcriptase, putative n=5 Tax=Pediculus humanus corporis RepID=E0VPJ4_PEDHC"
gagatgctagaaacagtagaaacattctctaatgatattaatatgcacttcggactggacaagtgccgtattttaaatatagtcagaggaaaagtacagcccggaggattcgatatgcaaaatggccagaacatcgaggccatgggtgaaaacgatatgtataaatatcttggagtaaagcaagcgcggaaaattgaccataaacaaatgaaaacagagataactacagagtttatagaagggtaaaacagctgcttcgctcacaccttaacagtagaaatttgtttaaggcactaaacacctacgcatgttccgcgcttagctactcatttggcattgttaagtggacaaaaacggacatagaaaatcttcagcgaaaagtacgaacgcaccttacaaagg

SEQ ID NO: 14908 - DNA, 411 bp, Diabrotica virgifera
  SmartBlast Evalue=5E-10; Info=Endonuclease-reverse transcriptase n=1 Tax=Bombyx mori RepID=D5LB38_BOMMO
attttattatctatgctacataaatgtaactttttaatcagctttaacacggttaagtctcagcgtacctccgtatcttagcttgaaaaataagagtaaggtagaattaaatcaaccatgtgtggtaagtaaggatcaatactaacataagacttgcagatgataccgcaatcatagcagagagtatagacgatttacaaattctcctagatatcattaacagaggaaacaaaaagatagaactaacactgaatataaataaaaccaaattcatggtgatctcaaaaaaccccgttgacaacatacacctgacatttgagggtaaacctatagagagggtcgacaagtataaataccacggagcaattataaactcacaattagatatcaagatgaggagataaagatcag

SEQ ID NO: 14909 - DNA, 405 bp, Diabrotica virgifera
cctctacgtacgagctcacagcgtataactaagtttctcgtccgaactgtgacgggcatttttgtgtttataatgtattaggtatatagtacccaaaaaacccatttgcaacctggctgctcaagtgtcccgacaaaaaccttatttctctggactagtaatatataaaatatctatactgtagatttgtacactatgtatattatttctgtttcctatttcttttcctagtcttttataatagtagtaatattgtttcataatttgcgtccgtaatttagatacttttaacgacaggctgttttattacttagctttaggatatattgtacatccccgtaaataagggctactttgccgtttccaacaataaaagtagtatatagtgtgtatgtacattttttg

SEQ ID NO: 14910 - DNA, 410 bp, Diabrotica virgifera
  SmartBlast Evalue=1E-41; Info=GRAM domain-containing protein 1B n=1 Tax=Camponotus floridanus RepID=E2AYU0_9HYME
gtccctcgatatcaaacttccaaatatatgcttgtcttcacttgtagctatacctacggcattaggtattatccttgcagttttttcttttgtaatatcttccaccgttaatattggaatcaataattttgtaacatatccaaaaacatttgagtaaaacgcgaaatagtttttcgtgatataaagatgaccctgtaatagaatgtctcctattagtgcacatgagtaatagttcaatactttttcgtcttcttccacattaggaaagtgcctcatgaattttttctgcctcgctttggatgttgtacggatttttggatctttggttgttttaggactaggaggttctgttacttgagcttgtgctgtcattattggtgttgatgttgacaagtgctttaaagatgctt

SEQ ID NO: 14911 - DNA, 401 bp, Diabrotica virgifera
gtatgaaattgtgcgtgaagtgctttttgcgagcttgcgcgatgtatagcactcactccgtttcataaataactatttcatatattaaaaaaaagtgtttcgacccgggtggatattattccagattttcagatttgggcacagagttggattgttggggcatatatggagagcaggtagcgcaacaactataaactcaattttacaatggagacccggagttagaaggagacgcggaggaactagaataaatggttacaggaattaaaggaagatttatatagggcaggaattagagactagcagaaaacaaagatgatagaaagaaatggagaagcatagtcaatggtgtcgagtggcggattgggaaaaatctgctcgaaaagatggatctagatagc

SEQ ID NO: 14912 - DNA, 405 bp, Diabrotica virgifera
taatttcaaagggctgtaactttttatgtgcatatttgtacaaggtaagttgggttcattcgaactatttttggtcccagaataatgtgatttaatttatgacatgtatttttgttacaccctgtatatacagcccattacgcaccaccttggagattgggcgtttttgatgtctcgaatttcctaaacctgttgttgcatctaagtgatttttttataatattctagcctaggccctagaatatgttacctccttatgcttgtcatgcacaggggagctatactgtaatatatattatatctcattactatagagagcgatatgatataatatacatatattacagcatgacaagcttgaggaggtaacctatagcctgggctataatattataaagacatcac

SEQ ID NO: 14913 - DNA, 411 bp, Diabrotica virgifera
aactgttattggccaacagctgttgaaactagaaaaagagaaactgaaaattaaacagaataatctttttgtcattcaaatgtcgtcaaactacttcttgaccgagcagtgcaggtaacctccttgctatgtgctgtcgatatcgaccgcgacttaactagtggcattcaccgcaacccacttgttctgtttgtaccttaagagtagccagctaccagctattacacataattgcataatcagatacaactgatttaacataattctaagaaaacattaaacaaacaactacaaagttgaggaaaccacgctacggggtattcccatctcggctcactataatcctttagtcctttatgataccccaggtacacttttaaaacccccaggtcggctcgaagattaacaggt

SEQ ID NO: 14914 - DNA, 410 bp, Diabrotica virgifera
aacaagttcacgcacttaactaagaaaaactgggaagcactttcggacaaacagagggaagcgtgcaacaaatattttggaaaaatcagagacaaagttatacgctcatttcaagcagtaaatgtaagaacagtggttccaaattcaatacatcaaccaatcgacgaggaagttgaagaggaacaaagcgacgaggaagcagaagaaggaaaaagcgacgaggaagtagaagaagaaataattaacgacgaaataaaagaggaaaaaggtcacataaaacaagatataacaatattaaacatggctctgacaatcaacgaatttttgaatattgcaagcaagatattgcccaacgagttcgatggaagcgcaaggaaattacaaccattttggacgcattagaactactt

SEQ ID NO: 14915 - DNA, 410 bp, Diabrotica virgifera
cctgtaggcttaaatcacaatctaaacgaataaaccattggtttcgtcaatatcagtccgttgagaacacaaatataaatcaataagtatgtcagataccgaccaacatttttttatcaaaagctatgtcacatcattatgaaattatcaaaattaatgtccagtaaataaaccgggaatacctcatttaatcatctctacacacaactatacacataaaactgaaaaaatacaaaaatcacagcttcacttcaccaagttcatctactggatttcttgtaaataaataatactcagtccattttaaaagaatcccaataaatatatattattttttaaaattataaataaatctaataaaataaaacaaaaaattgcactgtacatactccatctctaacataactgta

SEQ ID NO: 14916 - DNA, 408 bp, Diabrotica virgifera
  SmartBlast Evalue=2E-10; Info=Reverse transcriptase-like protein n=1 Tax=Glyptapanteles indiensis RepID=B7S927_9HYME
gttatataagaagcaaagatctttatgttgacgacgactctgtaatgagtcaagtcgaataatttgcagtaaagactcataactttgaccagtcagatgcatcttataagcataataacgtaagaatttacgctgaacttgttcgattttattaatatggcagttatattgaggtgaccaaacacatgatgcataatctaaatgtggtctaaccaaagaacaataaagaaattttaaagaacgaccagtcgtaaagtcatagctgcatcttttaacaaagccaagcatctttaatggagataaaaaacaaatggagataaaaaaacggtaaattttcgcttttttcgtctattaccaaaaagtgaagcattccaaacaaatttgagaataagaaactcacaaatcata

SEQ ID NO: 14917 - DNA, 406 bp, Diabrotica virgifera
ctacctcgtccctagtcccaactggtcttcttagcagtaccatctttggcattcttccttatccatccctcaaaatgacctgcccatctgattctttatgactttgtttatcttgttatacttggttccttgtaatgcatccttaattcttgattgctgcttctatgccagccgtcttccgtatctgtattattttccctgaaaatagctctcagtacgttccgttctcaactctttatcatttctccttctgttttatttagcacccatgtctcacatccggcaggtgactgttgctcttattacggttttgtatattctggttttcgtctttctcgataagtactgtgcctttaattcgaataattttttgttaataataatttgtgaaacatcactatttccc

SEQ ID NO: 14918 - DNA, 407 bp, Diabrotica virgifera
agctctcaattccaagttcctttcccttttttcttttgctttagtatctatacggtgtattccacgaatataagactgttttggattatcgcgacaacgaatattttagtgtgcaacataggaagtacgaaagtactttgctataataattactccaataaacaacaatataatttgcaatttactttcgttcttcatatttttcacagtagaatattcgttgtcgcgatgatccaagagggtcgtatattcgtggaatggggattacacataatattaaaggctggtatccttttgcgaggaagcatcttccccagaaaagaaattttattttgttgtgattttattttgctttattatcagttacgttaattaaattttcagagtttttattgattactgaaaac

SEQ ID NO: 14919 - DNA, 410 bp, Diabrotica virgifera
  SmartBlast Evalue=2E-13; Info=Endonuclease-reverse transcriptase n=1 Tax=Bombyx mori RepID=D5LB38_BOMMO
ggaattgaaagctggacattgaagcaagaacacataaataagctacagttctttgcaatgccgtgttacaggaggatgtttaaaatagcatggacacagaacaaaactaacacggaagttttgcgagaaatgagtaatgaatacaaaataatgaacacaataaaaataagaaagttacaatatctagaacacgtaatgagggaacagcgatatgaaatgctaatgcattcttctatacatggtgtccagaaactctcccgacaaacgaagaccggagattcttcagataattttaagacaatttaacccaattcatatagtgcgaaaatgcttcctgagggagctagagctctttaaagatggcgtcttggaattagtttttcttaaatatctccagaacgcttctattt

SEQ ID NO: 14920 - DNA, 409 bp, Diabrotica virgifera
  SmartBlast Evalue=2E-33; Info=Drop dead n=4 Tax=melanogaster subgroup RepID=Q8IR42_DROME
acaactgtttgacacagcggattacatgtacatcttgcctgcccatagagcaacggtttatattatgggtatattcttaggttacatactgaggaattcttcgaatataactctaaataagacccaggtaaatattggaaacgccttagcaattctgacattctgtgtatcattttttggagcagcatatatgggaaacatagattacgtttacaatgctcaggatgctgcttggtacgctgctgtatcacccattttgtggtgcttttcgttcgcttggatcatatttgtttggcagttaggatacaaagatattgctggttacctcttctccaacaaaatatttttactctggacaaaaatatcctacacagtataccttacccagtttccagtatacttctacaac

SEQ ID NO: 14921 - DNA, 409 bp, Diabrotica virgifera
atgcttggttacataaaaatggataacagtggatttccttgtatcagttgagtttacgcagaaagtttttgatactgtccctagtattctaacttgggcatagacacattctctttaccgtcagtttctttttttttattggctttaggattagaccatgcggccagaaacaaagtaaatagtacatacataaacatataatatatcttatctaaactatctaattactaatctaagttaaggttatctaagtctgaccgacctttttgttaagaatagatataataaacattttattttcaaagcgaatttttgctaaattaatcttaataaaattttgggataaggacaagggtcacacttttctcatccaagggtttttctttttcttaataaatattgattacct

SEQ ID NO: 14922 - DNA, 408 bp, Diabrotica virgifera
taaattgctaagcacataatttgattactattgtctactgagattctttattacaaagccaaaaatgaagctaacaggtgtatgttttttaatcgtggctttttgcgctatcaatgcatcagcgagaacgatcagcaataaatgggagtccgggaataatcaagatgatctaccaacttctatagtaactaatccacctgatgcagcgactgattcttcatctgtttcaccttcggattctccacctgagccagtaacagattcatcatctactgcacctacagattctccacctgacccagcaactgatccatcatctactgcacctacagattttccacctgagccagtaactgattcatcatctacttgcacctacagattctccacctgacccagtaacagatt

SEQ ID NO: 14923 - DNA, 403 bp, Diabrotica virgifera
ccctgtgcccttcatatgttatgagtattttaaaaatatgaaggtttgtgtggtgagaggaccgaaataaaagggtgatggtttgaaaattacgatcctgttgcctgtatgtcttttccgtgagtgccggtcggctttgactgactgtatctcaggagccactcatcacaattgaaacgttttctttaaaggaggcgtcctgccgtctttttttccaattaccgttttcataatttaatttaatatttcccgaggtattctatttgtttgtaagccgagggattgtttataattttaaaatattcctggggccgcttaaatggtccaatttcaattctgtaaagtacattagatggtatccagtgtctttttgacaggagtcatagttgttcttgtgtgtcat

SEQ ID NO: 14924 - DNA, 406 bp, Diabrotica virgifera
tatgaaagatgtttcatatttcaaggagaaaatttaaaaatctttatcctgatgctgattcgttaaattgacaagataatctcaattataactgtaataacagttggtttccccgttgacaaaaataaacagaatagattcaattttgacgttacgaattgtaaacttacaaatttgtatagttacgaactgccacagttacgaactgttgccgttacgagttgaccgttaccatttgtgcagttgcgaactgtcgcattacgagatgtctggtcacgattaatctcaccagttgctcgtttttttttcaaattttttcagtgagttatgccataatgttttgatatttagttcagtcaatgcccagatcatctgaccacattaccagtgccataataactattta

SEQ ID NO: 14925 - DNA, 403 bp, Diabrotica virgifera
tccgtatgcattaaccggcgggtacggcacatttaaatctgccggtcggtgtttcattaggaagcatcggcagaaattgtcaaaaaaataatcacgccgttttacgtcgtttaattgatattgcaattttttaagttgtcaggaattatcatttagtggacatgatggatcaaagcatttgttaaaaatcaaagtaattatagagaattaataaaattgttttagaaatatttactttctgattcgaagtgtattcgtaatacagaatgaactaatacataatataatcaaatagttacattttgaataacgttattgaatctgagatttagaaaaccatttgcttttcgctggaagtagatgaaacttctgattatcatgtcattcacaattatcaactatt

SEQ ID NO: 14926 - DNA, 396 bp, Diabrotica virgifera
tttataccagtaaggatctgcgaaaaaacgtctatttttggatgtgagaggtggcattcggatttttgcagataaagttaggtgacaccttcagtaataataattgacttatgctccttctcaatatgcccggaacattaataagagaattaaaatatttaaaaatttcgaaaaacatcgatttttttctgctttctttgcttataactttaaaacgattcgttttggaaaaagtcgtacagggaaatgaaaataaagataattgaattttgtataatatacgactattttaaaatgtcttaaattattaccctttctgcaaaataacaataaatagaaaataagggggcaaaaaagactgttttattcaatgttttcaaacattttggttacact

SEQ ID NO: 14927 - DNA, 409 bp, Diabrotica virgifera
  SmartBlast Evalue=3E-42; Info=Endonuclease-reverse transcriptase n=1 Tax=Bombyx mori RepID=D7F161_BOMMO
tatcataatttttgttttttgtttattgatcttgagaccacatctattgctttcggcttccactagctgcagcaggctggacatttcttcttcggatgcagttattaatgttgtatcatctgcatatctgagatttgagatcttctttcctgcgatagaaataccgccattccatttgtcgagtgcttttctcattatatattccccatagaaattaaaaagacttggagatagaatacatccttgtcggactcctctacctattttaaaagcatcggacttatggttttccattcttattctggtttcactgttctcatataggcttttcaccagagctgacagatgatcaggaacccccatctcatgtagaactttccacaaaactgtccagtttacacagtcaaat

SEQ ID NO: 14928 - DNA, 403 bp, Diabrotica virgifera
tgcaccagaatggaaagtgggcgagcacgtgcgggtggtgacccggagggctgcaaacagtgcgcctgcgttggggagggtgatgcccaacattgggaggacccaaatccgaaaggaggagggccttgcacggtgttgtgcagtcgatcgtcctctatgcggcaccagtctggagtgaggcggtagagatacaggcctacaggggctcattacacgagtggacagaacaagtctgctgcgagtggcatgcgcctacaggactgtgtctgccgcagccttgtgggccatcactggatgtgttccgctgcatgtgttggtagagaaagaaaagaactgtatgagagaagagaccttgagcttactatggccgagagaagacaggaaagagaaaggtcaattgaaa

SEQ ID NO: 14929 - DNA, 409 bp, Diabrotica virgifera
ccctccttcagttgtagacgagaaccaagtccacattgtggagtagcgcaatttgcaccagcacaagctggatttccaaatggttcgcatgtgggacaacaattaccatctttcatcttcaatatagatccaggagggcagtctgtagccactgcaactgtgcattgtttaccttcacatgggttatctttgggtaacaatgggttaccgaatcctacgcaagtgggacaacaatcaccttccttcacttttgcattagcaccaaatccacattgtacaggttcgcacgttacaccatcacattttggatttcctaaaacttccgaagagcagtaaagtactaaggcacacagtacgaaatacttcattgtgaatttttatgttaaaataaaaactgatggtacaaaag

SEQ ID NO: 14930 - DNA, 409 bp, Diabrotica virgifera
attgattgtaatgaaaattacgtttttaattaccgtttgacgttttgaaatcgttttcaaaaaagatctttaaagaacggaaacttgacaaatctcaggtatttaaacatgcctggggcaatgaacatggagtacattagaaaggtgaatcgataatcatgaaagaaacggacatgtcaacgagaaaaatcaaaagaaacgtctctcatcctacttaatgaagaaaaatatgtaacaaacccatcagcagaatgtagcagactttcattgtcagtatgtcagtaccaaaagaatttaacaacagcatattaatataaattcgtgagacatacatatctacaattctacataatacatacactaatacatatgcaacatacattacccaaacaagtgtataatccacaag

SEQ ID NO: 14931 - DNA, 409 bp, Diabrotica virgifera
tgttgaagatgtcaaaaatataacaaatataggctaccttgattaaccgattgacatcatgaaaactatctttaaattgaaatattgcatccccagccgttggtggatgttgttctaagaatattgcaatttcttccttcaattattcaattaattaaattttaaagtttttttaaacattcccttttgatagtcaacgcacttcgcagtctaaaagaagatgttcatgtgaaacgtcgaggcgacccggcattttgctttcgtggcccggtaccgggtcgcgacccaccatttgggaaacgctgctctaatctaatatagtaatacacgttattaacggttgttaaacagattatatacaaagttgaatattacacaattttcaaaatttaagtaagactgaagccgc

SEQ ID NO: 14932 - DNA, 408 bp, Diabrotica virgifera
  SmartBlast Evalue=1E-10; Info=Armadillo repeat-containing protein 6 n=5 Tax=Catarrhini RepID=ARMC6_HUMAN
ggattgtcattttgctaacttgtccagttcatgttcatgttgagtttgtcttaggaaatcttctgagaaagaggtaacaattactgtttgtttaagaagtaaacatcgatataaattggtaccatttcttttttactaactcaatattaatttgaacacaaagtagcaactgaacagtaataatacataaagtgggcacaaagaaccaaatatggtgttggttatatctcaagaaacctttgacgatgctgttcgtgaaaatattgaagatttgggattatcaccagaagaagctttgagagaagcagtgacccaatttgaatcccaaggtgtcgatttgagtaacattatgaaagaacttagtttatcttctaaagaaacacagaatattggagctgaagtgaacaa

SEQ ID NO: 14933 - DNA, 409 bp, Diabrotica virgifera
gttgggggtgggggggggggggagaagaattttctcattttccctcctcgtaggtccgccactgaaatagatacacgaacaaaattaatttaaaccacagacatataatacccagaccgcgggccgcgatctaaaactgttccccccagtgcgacagagaaaagtttttgtatttagggtatgcatctctttctaatggacagggtttattcaatgacgttgggtttatcgacaacatgactttcccactgccgggatttaataaaccccgccgattagaaagagatgcccaccctatatacaaacgtttttctctgtcgcactggaggaacaattttagatcgcagtgcgcagtccaggcattacatgtccatggttcaaacgtgcgccaaaccatccataagttagg

SEQ ID NO: 14934 - DNA, 408 bp, Diabrotica virgifera
tattaggtcgactttattgaaatttggtacacgatttaagtatgttacaaagaatttcctaagcgaattaccaaggttctaagtgccaccaaagtggttaaacaatattgaataacaacagacttattttgcccccttattttgtatccattgccatattgcagaaaaggtaataccctaagacattttttaccagtcgtatatcatacaaaattcaattatcctctatttcatttctctacgactctgttccaaaacgaatcgttctaaagttataagcaaaggaagcagaaaaaatccatgtttttcgaaattttcaaatattttaatttttttactaatgttccgggcacactttgagaagaagcaaagtcaattattattactgaaggtgtcacccaactttat

SEQ ID NO: 14935 - DNA, 409 bp, Diabrotica virgifera
gagactaataagtttcgaaaccggtagaggtgcttgctgcactctctgattggactagaatatggttcggctgtattttcgttttgcaacgaaattgaaaatgggtattcatttttaaatggaaaaaccttttttatactcacctcttctttttattttcttaccatattttgttagtagactattacacattgttaaaccacttatgtattgataattatttgagctatataattattgttgaatagccttaattttttaagttttcctaatttgttttaataaaacggacatataaatagttaacattaattgtagaaatatcatctaaatttctaaattatgtaagtcaatcattcgtaattattgtagaataatatatgttgtacatgtactgatattatttatt

SEQ ID NO: 14936 - DNA, 406 bp, Diabrotica virgifera
ctttgactagtcaaacctaggagagactgagttggtcaggcaaaggtcgaaatttaattctatgaaatcggggtttgactagtcaaaccacgaccagccattgaactgtcgtaatttgttagattaggtttaataaaacgtcattttttaattttaatgtttataatttttgtattgtcgtaattaaaattaaaaaatagtataaaataaaaatgtataccatttttattcagttgcaatgcgaaggcaaagcaatcttacttttcaattagaatcagtccagtcctctgaatcgcgattttcggctcttattggagcctctgttctccaaagttccttccctttgtcttcactgcagcatccatttggcttgcaaattgtagaagctttggaggtgtcaccaggg

SEQ ID NO: 14937 - DNA, 408 bp, Diabrotica virgifera
aatgattaagtaacaagatattgtatggtaatatagcaccggtattctttgttgatttgttaaaatcaaagataatgtatttgaatccatgatatatactcatacccgtgcaaatgttggagggattcaaaaaagtgacaggcataatattcaaacgacgtggttgtcggtttgaaatgtaaatattcaacttaacgaaaataacaatactgtatgtatactattcaaggttgattgcaataatcatattctgtttagttaagagtcgatgttttatgttttactctaaccatttgtagataagacacccattcacattattaaagctttttaccctctaagagaaaatatgaccacagtattctatgtgttttgatgacaacatttgaaagatgcacataattatgt

SEQ ID NO: 14938 - DNA, 408 bp, Diabrotica virgifera
ccaaaatgacaacggaagaaacggcaactgaagaaactaaaatggtaacggaagaaactaaaatggtaacggaagaaactaaaacggtaacggaagctaaaatgacaacggacgacactaaaatggcaacagaagagactgaaatggtagcagaagaacctaaaatcgtaacagaagaaactaaattagcaacagaagatactaaaatggtaacagaagaaactgaaactgtatcagaaacaaaagttacaactgaagaaacaaagaaagttcctgaagagacaaagccagtgacggaagaaacaaatgtagcaccagaagaaacaaaggtagcaacagaaaaatcaaaggcagttatagaagaaactaaggtaacaacagaagaatcaatggaagtaatagaagaaa

SEQ ID NO: 14939 - DNA, 408 bp, Diabrotica virgifera
cttgtattcagaattaagtataatgcacgataaaattatgaaaccggatgtttatatttcaggtttctagaaaactaaattctacaaacaattgtatgctgccaccactaccatataatgattcatataacttgataaacttttgtaaaagtcttttacacttgacaattatttgcactgaaaccatattgtgtaactatcaaacaaaaattattcaactctattgacagcaatttgttgaaactcaatatttcacagtagttttgttatctgaaattgcggcaatattttttactacttttacacatactatgatagtacaatattgataaaaaataagatttgctatattacattcatagctatacagtaaccgccacgctactagacacacgggtacattgagct

SEQ ID NO: 14940 - DNA, 408 bp, Diabrotica virgifera
gttgggattaattttttattctaaaatagtagtacctattttacttacaccatgaataaagtacttttggtatttgttttggcaactgtcctagttcaagtatttgcccagagtgccagccgtgttcaattaggcaggcttgactgcggagaaaatgctgtacaaggttgtgctccctgttgtccagaagcagaagcaacttgttccaacaaagttcctcaaccatgtcctggtatttgcactagagaatgtaggatccaatgtcgttgtgctcaaggatacttgaaagacacggccactggaaagtgtgtcaaagaatgttaatttcttatttctaaatatctcaattatatttacttaataattatgcaatgtaaaacaaaaatataacaaataaatctttatatt

SEQ ID NO: 14941 - DNA, 405 bp, Diabrotica virgifera
aggtctctgttagataatactttgtctatagagaaattcacaccgagaatgcagtacggctaagatagggcaatatatttctaatggggaataaacgcacagggttgtcggtcttcaccagttgtcgattgctctctcaagagcgtcgcacaggaactgtggcaacactgaatgcgcattcaagcgaatggcgtgaccctgtgttacaattttaactgatatccaaggtaaacgatttgatcaacttgctcaagtttggtactatgtatttacatattgtagacggtttcatattctgttttttacttattatgagtatcttggttttctgtatgttcaaatctagcctgcttccatacagctctcaacgacactgtccagtaatgtttcagatcttcttgagca

SEQ ID NO: 14942 - DNA, 406 bp, Diabrotica virgifera
caaggaccttgtctctttttcgtgataattttcacggaaataggcatggtattcgtagggtgcagcaaaatagtgctaaaatttgttgattgacgaaggaccgacgtgttttttacacacttgtttaaccaaaaactcaagattccaccgaaaacctttatcgaacccagagggtggctaccgaaggttgttatattcaaacaaaaatgtgatatatctaatgctaccaaggaactcgtcaattcaagtaaagaagaaaattagaaatgaaggcacataatatggattcttgtgtgtatttaggccctgtagatccgccaaaagaacctggtattacaaaattgttcatggtattgccatatgacattgcaattagaatattgggagcatttatacctcctttccg

SEQ ID NO: 14943 - DNA, 405 bp, Diabrotica virgifera
cataattacaaatattttggtggttggcatgtaagatcacgtgagtgtgacctacaactttttttaaccgtggtcaagattttaaaacctttgcaccattttataagattatattcatctgaatataatcacacccacttataacacagctaaaacaggtctaaacatacttaataacaacaacacgtgcaagtcattaaaaattctgagaaagcgaaaccttagtcaaataaagaaatatatctctcaaatctataccatcccatttatgaatttcgcaccaaataggtacctaatcattgttttatttttctttaataatacattaataaataggtattctaaaatcagtctcctttaactgattaataaaaggtcccattttttggtctacgaataattaac

SEQ ID NO: 14944 - DNA, 407 bp, Diabrotica virgifera
  SmartBlast Evalue=2E-25; Info=CAP-D2 condensin subunit n=1 Tax= Tribolium castaneum RepID=D2A3E3_TRICA
caaattgaaatattgtcatcaaaagttgactttctacatcaatgcgttgaattccttcaggcgatagacgtagccatcgacgtgtgtatagaactattagaaacgacgtctgtaagtgacatgcatgaagctatcgagtttttcgttgctgcgtaccagttcaacattgatagagcatccgatggagtactagcaatgttgcggataatgcaaagaactgaacaagaacgaaaagacgccatcattgctgcgttcaaaactgtatatttggtatctgattctaaaacccttaccgaacactgcacgattgttgtccaacgtctcatgcgtctcatcaagacactccccgctacaaatttaccagatctacaagacataatctctgattgggtaaccaaaggcacact

SEQ ID NO: 14945 - DNA, 400 bp, Diabrotica virgifera
acataacatgtgcatatatctaaaaattggtgatctaacaatattaagttatctatgtcatacaaaatgtgtatagcaacaaaagaacaaatcgacaactgtgtaggtacgtatccattgggttggtgctccgtcctctgtgtagctgctccacatagtggatacgttgcggtggtggtttataaataaagtccggataataagcatgacagaaaggtcaaaataagcacttatataagcaaaaaaatgtcgcaaaaataagcaaagtttttatgaaataagcaaggttcaagaaaaaaaacgtgtaagtaaacatggatataatgatataaatatgaataaaggacattcacattaaattacatttatttttaattatcgtattacatattaacaataa

SEQ ID NO: 14946 - DNA, 398 bp, Diabrotica virgifera
tttttttcgaatattatattaatatatttaaatattatgcaaaagttttgtttgatagaaataattatctctaaacttctgtatgctaaaccgcgcaaaacaaaataatacagaacatgaaagatcaaataaataaacacctaaattttgtaatcaaccgttaagtgtaaaaaagaaaatgcgtaatcaaatcactgaatgagattgtttatttaaatttgtttaagtaaaaaattcatatatgcatagcttaaaaatcaactcgaaaaaacaaatatccatttgagcatatcgcaccccgcttcagaagtgacacaactctaaatttttcatttttgatttttgcgttaccgattccaaaaaaagctctatatacaacaaaaaccacacatgttaac

SEQ ID NO: 14947 - DNA, 397 bp, Diabrotica virgifera
gaattaataaagaaaataatcaaaaattgattttgggcccccactgtggctttagggtgcacagaaaataaaatatgcataggtcataatgtgtagcagacagtgtgttcttttattttccataagtacgttatcactaaaatgaataggtgacgaaaaaaaaaacaaaactggagcccgccaaagcatttctgaggtttacggagccactgtgccataacggttgcttatacgaaaaaatgcacaggaccttatttgtagagaaaatggtggtgttaattctgtataagttttgtttaaaaaaatagcataggtaatgagaaaatcgtaaaaacatgctctccaagggataggggtagttttgcagtttattttcaaggataggggtagtttccgc

SEQ ID NO: 14948 - DNA, 404 bp, Diabrotica virgifera
ttagatcaaacaaagtgccaaaagcatggatttcacgggaaacttaaaaaagtaaatagagtataatatagtggtagaggagcaaagtatgctaaatgtgcagtcactcgagcgttatggggacctattgggttgtgaagagtaggtcctaaaaccaaaaaagttacgtaaagttttccattttagtggggactttccatttttaatttaattctccatttccaacaatcgtttttttagattatagcgccatctatccataattgaaaaaatgtctcgaataaaggttacttaattttacgtaaggaatccaaatctgcaataaaaaatgggggctcccatttaagattttaaagtaacccaaccccacctccgtgggaggtcgtgttggtgacattcgatag

SEQ ID NO: 14949 - DNA, 406 bp, Diabrotica virgifera
gttcatcaaattttatagtttttgtggtaaaggagtttatataccaatatctccataactccatgttaaactcataaaaacacatccctcccacatttctgtaatttttgttgtaaaattcacgaacggttattctttgtgctgtataattctggatgatattttctttcaaaagatctttaacgaagtcctctaaaacagataatgccattattaggaatgcggtaaaaacaattccactgtttttttaaacaactggtcatttacagtcaacacacaaaaggttaaattgtatctattttattatttacaagaccggtctaagcaggacgcagaatgcagaatatagaagagacaccgacactatcaccagcagacgtaaaatgatagctgagcttgagctgag

SEQ ID NO: 14950 - DNA, 406 bp, Diabrotica virgifera
  SmartBlast Evalue=5E-39; Info=E3 ubiquitin-protein ligase HUWE1 n=1 Tax=Camponotus floridanus RepID=E2AL17_9HYME
ccttcgctagttctagtagcagtttagagccaccagcaacttcttgttttgcacacaatggcttaagagtatttaatacaagagacagttgatcaagtccttgagagaataaataaggttcgtgtgacaaattcaatatactcttgcagacagaagctactgcttgtgctggtactgtcgtgggataatcaactggtaagttgggcaatccaagaacttttaataaaggataaattcctcctctgcttacaaattctttgcaatggtcatcagtggagttattacttaaaattgcatctataaatttcatggtattgaggatataatctactaaagcaataggtgttctctcgctattaacttgagtttgagtctcagagtgattttgagatgatgttgatgtttc

SEQ ID NO: 14951 - DNA, 406 bp, Diabrotica virgifera
ttatccaaattatttttaaacagctcattttttaatcatcataatttatcaaattgtcttatacaaaatgcaatgtcacttgacttcgtctgtaaaatttcgtaggtattataaaatatcagtaaaaggaaaaatctcaaaatgtcaaataaaatattagtaaaatattaagcaaaaaattgaaatcgaaattttctttaagccattgtacctaaatacctatccctatagcagcagtaacagtctccgcatctcgttttcggaatcggaaggcggtcggacgatcgcttccacagggtttcaaaattcgcgtgaaaagaacatgactagcgggtgagggtattaaaccctgaccaatttttgaacgggacaaatgcatgacaagcagcgattttgagatgcgctt

SEQ ID NO: 14952 - DNA, 406 bp, Diabrotica virgifera
taaattataaaatatatttgataaaaaatattctatatacggatctgtgactaagaagctagcctgagagacttatgctatggcttttatctagaaacaaacaatttccaaaatcatgtttttgacagttgaaaaaaatccgtttgacagttgttgtgccaattagttttttatttttactaataaatggtaactggggactctagtttgtaatttgaagtctgtaagtagacacactaatacaataaaattagcttttacaaataataaacaataaagtatacactttaggagacttaaaacaatttaaaaccgaatttatcaaaatgcatataattctaggtctgtttatttgtttcctggtgtagcacgagttctaaaaatgtgtaaaagtgctacactaagt

SEQ ID NO: 14953 - DNA, 406 bp, Diabrotica virgifera
  SmartBlast Evalue=2E-37; Info=Isoform Short of Conserved oligomeric Golgi complex subunit 6 n=1 Tax=Drosophila melanogaster RepID=Q9V564-2
agctctcatttctataggagcaggatttccagatggccctcctcgtgttagagcgttgataaaatcatcagttatcttgcttctgcgacatatgcagtattcatcgattacatacttaaacaaaacttgtctgtgttgaagccttgccattgattgtgtaactagatctgtcaattcagggttttcaacatttctacagtgactttgggtccatctatataatttttccaaccctgcctcctgatatgtggtcatttgctccataatatctaaagccaacgtttgaagaccagactgcataagtattttacaatcattgcgtatttcttggatcttatctagtacattaaatatttcaggagtcaataaaaactccttatttccttgaatgatatagagttgctct

SEQ ID NO: 14954 - DNA, 400 bp, Diabrotica virgifera
ttctttgtatctcgagatatcttaagaaacgtgtaaattttaagcaactgttaatgtcaccagtaaacgaagttaaggtaaagtagtgtgctatggaaaaaaacaaagaaacattttccagatgtaaacgtatataattaattaaaacaacaataagacaaacaacactataaaatataacaaagaaataaaagcaactacttacttagtgacgacctaaatgttcaaattgttgcccatcattttcgatgcaagcatttactctttcaagagtagattgaacagcagtctcaatttctgctttcgcaatgctttgaatggcgtttcgtattctctagattctagatcatgttttctcgagtagtgggactatcggcaaaaacaaggtctttaatccgtc

SEQ ID NO: 14955 - DNA, 405 bp, Diabrotica virgifera
cacatgcaggtgtctgtcagtcagtttcacgtgttgctttgctgttattattaattcatttccaaaaatgaatattagtccatacattttgtaacttctcgtggttaatttttcttttgtacgtatgtgatatgttcaactgatgttggcaaacgactttgtgtcgatataacttgcctttaaagcttaatagtttagctccgctttaatttttccatctcagctcctgtgccggaagaaataatatcgtttgaacatttacgtgccatggacgcgtttacgcgtccatgtcattgatctatagtcatatttggacgcgcgcgcgcgttaccggagctgaaagggttaaggataacgtacattaacagtttaaagtctccactctaaagaccttgaagtattagg

SEQ ID NO: 14956 - DNA, 402 bp, Diabrotica virgifera
tgttgttgtttatttgggtttatatgactgcgtacactaaatccattcgccaattttactattttttatttattagtcattttttcgtatcttatcctaaaactaatactaatattaatctctaataaacaattctactaataaataattatttttgtattttttttttaataattttatatatatatatatatattttattaatttttttccaaatgatgttctcagagttccacagcaaaaactgcaacattcttctttagccctctacttcattcgaaagctattttactatggactgtccaagttcgtcattcatttttatctacatatttttttttttattattttttttaattattattatttttttttcttatttttttttattatatctttttt

SEQ ID NO: 14957 - DNA, 406 bp, Diabrotica virgifera
gtaaaacccaatggaggcaaagagaagtgttaaagctgtttattgttacccgctgcaaattttttcaattgaaaaaaatagtttaactgattttggatatattttgccctctagaaatatttgaatagtttactcaaatctcgaagaaagtaaatttcatctgaactctatggttacattaataacaagatcatcagttggagttagatggatcatcagttaaattggagttatagacgctggcttgaaagagcaagtagaacgcgaagctgactattgagtaaaggttctaagacctaagaagagttgttgtcaccattaaattacttgcttctcaaggactagattttagttgatcccgtgaggatttaacgagtcgtcataagggaaattacttaagttgtct

SEQ ID NO: 14958 - DNA, 405 bp, Diabrotica virgifera
  SmartBlast Evalue=2E-15; Info="Transmembrane protein, putative n=1 Tax=Pediculus humanus corporis RepID=E0VSA6_PEDHC"
tttaaatcctacgactaggtactatctaaaactagcgtcgaagtatatttggtacaccttttgtcacttattttattggaggaatgtaagagttccttgatcagtttttaagtatcgacagtcctggttattggcactgattcgttgtccaacaattcatcgtcagctgataataaaacatcactttcagaatcgacacgacgtttcctcgtaagagttcggtatttcacgtgcattctccttagaagactttctctggtaccactatatctcctcttcgctgggtctttgtacattaagaagttgtcggttacccaaaacattaacatattcacaaaaaacggtataatcaacatcacaaaagcaacctctaccttagcgttaggtataggcgacatgataaag

SEQ ID NO: 14959 - DNA, 405 bp, Diabrotica virgifera
atcgctttggagtgctcatttaacacggactcgctggtccaccactaagaataatataaatttatttataaggtcacgatagattagttatcccactctacctgctatgtacaagactgtagaagcattatttgagttcatttcgttcttgatatagagaataatgctattgatcacattattgtgacttaaagtaacctgtaactcggttttcacttactgacttatgtacagacttcttatatgttgctgatactcattaaatcgacagtaataagtttatatttgtaatgtgactatcattttacacaaaattttgcctgcactgttaacaaatctgatggaactcaatacacaaacagtggtgctcacatgaatgccatacttcagcgactcatctatagg

SEQ ID NO: 14960 - DNA, 405 bp, Diabrotica virgifera
  SmartBlast Evalue=1E-23; Info=Mitochondrial ubiquinol- cytochrome c reductase hinge protein n=1 Tax=Culex quinquefasciatus RepID=B0WLN6_CULQU
cggccgagctcaaattccattgtgttgggcaaggttttcaaatttcctttaagaaaaatggtattcgaaaggttcttgaaattccccaaaatattgtcagtaaaggctcaagacgacgatgaagagttagtggatccacaggaaactttacgggagaagtgtagagatacagaacactgccaaaaactagccgagaaatatcaaacatgtaatgacagagttaattctagatcacgtacaactgaaacttgtgttgaagaactttttgatttactgcatgctgtagaccattgtgtaaccaaagacctcttcagtaaattaaaataagttcatattattttgtaaattattgatgttatggagtaagtagataatatagacaaaataaacattattacatagtgt

SEQ ID NO: 14961 - DNA, 405 bp, Diabrotica virgifera
  SmartBlast Evalue=7E-10; Info=Endonuclease-reverse transcriptase n=1 Tax=Schistosoma mansoni RepID=Q4QQE8_SCHMA
gcgggtatagaaaaatggctaggaaaagagagagaagagacgagaaacgataatggaacaaggactataaatttatgcatcgaaaatgatctgataatagggaattcaaagtttacacacaaagacgtccacaaatacacaagggaagagaggggtagaggcgagagatcaataattgattatttcctaattaactccgagatatggaaagcagtaaaaaatattaaagtaaaaagaagcgcagagattggaagtgaccactatctagtcaaaatgagctatagaataataaaagacatacaaaatgacaaaaagagaaaaaataataaaagaaaaaatcagaagctacaaactgaaagaaatagaagttaaaaagagataccagaaatgtctagaagaacacag

SEQ ID NO: 14962 - DNA, 405 bp, Diabrotica virgifera
  SmartBlast Evalue=3E-17; Info="Protein FAN, putative n=1 Tax= Pediculus humanus corporis RepID=E0W257_PEDHC"
tttcaatattcaaaggactaaagtgggataatttaataattttgaataaaataagcgaatgaacgtaaaaaatggagaaagaaaggttttcattgttactacttgatcccggcgaaatatactttgaagatttcagcgcaatttttatacccccagacatcaccccaaagacttacgatactaaaaaacaggatggtaggctcaaaatgtgttcaaagtctttggtctttgacccaaaagatatttctaaacctatcattaaaattcttctgaaggattgtgtggttatagaacagtggaaaggcactgccaaatttttgaatagcaacaataatgtacttaacgtcaactgtagagagtatgtcgaattattagaaaagaatatcattgcaccatatcagttta

SEQ ID NO: 14963 - DNA, 401 bp, Diabrotica virgifera
tattgtttccataatctataagcgctaaaacaaatttagcaatttccctattctactttgcaaaattcatatagtatcacaacatggactaaatgtttcctgctattaacattgttattaggcgttgataaaattagtgtttaaacaatttggcaacatagccaattgagccgatgggtgtaacgataaaaaagtgttcaggtttctacatattactgagtcatcatgtagaaatctacaattaagttgaaaatgttaccacaatggtatgctacagtagagccatctctaggatcagaaacaaattaattcagggttcatatcaaccttaaacattattagaaacctgaattataattgccagacatttctatggatgctaaataacgcgccagacgcta

SEQ ID NO: 14964 - DNA, 404 bp, Diabrotica virgifera
  SmartBlast Evalue=0.000000007; Info=Thiol protease-like n=1 Tax= Culicoides sonorensis RepID=Q5QBG6_9DIPT
cgtacacatgttaagataagattttgatattaaattcaaatcatatataaacacaaacggaaaaagcaaactaaaattttggttaaactgaataccaatatttattcatctgaagaagaggtcaacttaagtatatataatagtgttaccatgaaagcagtgttcatattttccgtggttatattcgtaactatggttgcaacagaaattcgtgaggatcatgagtgtatctgtcctgagtactgggaacctgtgtgcggaacagacaacaaaacctattctaatccttgcttcatcaactgcgaagctcaatatactcctggactggaaattgcctaccgtggatgttgcgtggatgatccagacccatgtgcttaatatgtaaacatacattgtagcttaaa

SEQ ID NO: 14965 - DNA, 404 bp, Diabrotica virgifera
  SmartBlast Evalue=7E-14; Info=Protein BRE n=1 Tax=Camponotus floridanus RepID=E2AN93_9HYME
acatgatctaataagttggatcccttgtatatgatcggttgtacatattctggcagagaagagcaatctaccttaaggcagatcaaaaaatgtaaagtgttaccatctacactaacttcaatatcctgaggcgatataccttctgtaccttttgttagaattttgaactcctcagagtagcgggaatagatattgtcaagatgtaatttctctatctggtgtttcttatacaaagtcaaaaactcattaagaatctgtgctagagctttgggattttttaaattccaattcgtccaactaggaacaacttcagaaagcgtgtcaatatctgggtaacttaaaaactcttcatcgttaaaaataaaatctggagcgaagtagaaatcttctggatcaaatataac

SEQ ID NO: 14966 - DNA, 405 bp, Diabrotica virgifera
  SmartBlast Evalue=1E-14; Info=Cytochrome c oxidase assembly protein COX15 n=1 Tax=Culex quinquefasciatus RepID=B0XEF3_CULQU
gtcaaacagaacgacataaatgaatgataaataagtttcaaaactaaaactaaaatacaccgaaatgataaatttgtgtagatattgtcgttcttcatcattaattcctacagcaaaacagttgtttaaagttaataccaatagcctcgtgaggaatggccagcatagattgtataacaaatcttttttaaaaccccaatctttttctagaaacatgcttctatctagtttcttacgaggaagtggaacagtttcagttcaattgagttcgagtgctccaaaaggtcaaaatgctgtaggttactggctgttgacatgcagtggaatggtctttgtagctgttgtgttaggtggtgttacacgacttacagaatcaggactgtcgatggttacatggaaattatt

SEQ ID NO: 14967 - DNA, 404 bp, Diabrotica virgifera
atgcacaacagtattacagatatattagtaaatggaattattgtgttgaccactagttgccggaagacaaattaaattgatttttattgtagaggcttttacggccagtgtttttgtaacgatatattgtttttcgatcatgatatggaattatttctgcctgaagtttctagctaggaatgcagcagtggttaccaaaccttctacaacggttttagcttgcttttgcttactgaggagctagcgaagcttaagttggtgcaagacagctcttaacgttgccctattttctcttcttcgtagcacgtcctttcagaacgttggttaccatcatagctatcttaattttattcactgctaaacctaaatgcatccttgtatcaatattatatcaatctcacaag

SEQ ID NO: 14968 - DNA, 404 bp, Diabrotica virgifera
  SmartBlast Evalue=3E-14; Info="Nicotinamide riboside kinase, putative n=1 Tax=Ixodes scapularis RepID=B7PSA6_IXOSC"
ataacaattaacaaaagcttggccaaaattgtcatatgtaattttttacatttttttttaatttaatagaaagtgtattttatatcaaaaaagctagcaacaataaaaacaatattctaagaaaataagtacatggaatacaagaaaatactttaaatgctgctatataaaaagaaaatatccctaagtatatcttctacaacatcggctttgccactacaaaacttaataccatccaccgtttttcttacttcttctaattggctaagatgctcaggccatgcacacaggtcaaaataaccaggacaatctggtggatcataagttcgtagctcccttctttcaaagcactcttctttagttaatgtaaagtaatacatcagatcaaaaaattgcagcaaagg

SEQ ID NO: 14969 - DNA, 404 bp, Diabrotica virgifera
tgccggtataaatttccacgatataccttcaagtgataatttaatatttattgttttattggcttgtttaagaaacgaaccaagctccttataggcacctacaaaattggtaccattatccgaaaaaattacggaaggtttgcctcgtctagaagaaaatcttctcaaggctgacaaaaacgagtgcgtagtaaggtcccctacaagttcaagatgaacagccttcgtggccatgcagacaaaaagacaaatatacgcttttacacttttatagggttttgtaattcgatctcttatcaggaaaggaccagcataatctactcctgtattataaaatggtcgagtcggagttactctttctggtgggagttcacccattagaggttgcaatggaacacaactat

SEQ ID NO: 14970 - DNA, 404 bp, Diabrotica virgifera
  SmartBlast Evalue=1E-42; Info=Zinc finger matrin-type protein 2 n=3 Tax=Apocrita RepID=E2AFL2_9HYME
tggttgttctgtttgacaacaaaattcttataaatttaaaattggatcaaatacaaaattatctgaagatgtctgtgagacctgatgaccatcgtcgaaaatgggacaaagatgagtatgaaaaactagcagaagagagaataaaggaagagaaataccaaaaagaggaagcagaaaacaagaaaaaaggaattcccgtaaaaagagaactcctaaaaatccgtgactacaaagtagatctcgactctaaattaggaaaaagcattgttataaacaaaaatactcctacatcacagtctggtggatactactgtaatgtctgtgattgcgtggttaaagattctatcaactttctggaccatatcaatggtaagaaacatcaaaggaatctgggtatgtccatg

SEQ ID NO: 14971 - DNA, 404 bp, Diabrotica virgifera
  SmartBlast Evalue=5E-49; Info=Serine protease H164 n=2 Tax= Tribolium castaneum RepID=D2A6A6_TRICA
atcctgtaaccttacagttaccgtatgattctcgtggagcctttgcatccggtaaacagatggtacccacgttcttgctcaatctgaatttctccgtcagcttcaagatagctaagtcgtatccgtcttgtttgtacgatggatgcctaactatagcagctactttaataatctggaacggtaatggctcttcatcaatgcccaatttccattctccacctttgacaaggacgtcagacgtttgtaacccttcaatacaatgggcagcagtgagtactgcgtctctagcaatgatggcacctccacatagtaagctgcggttggtatctctcaaaatcatggcttgccatggatattcagcgaatttggcatctaagggtcctggtcctactggacttgtgttc

SEQ ID NO: 14972 - DNA, 390 bp, Diabrotica virgifera
gttctactttggtcttattatgttggataggtcttgaaatgtattgggaaatgaaaaatgcgctcgaagatgttttattttttcgcataaaaacggtgcaccataggaaaagaatacaagaggggttctttttcataagttgaacgtggaatgcaggagtagtttttgatttgaaatgtatcagtggcgtgccgatttttttctttaaaaaaattcagaccattacccgtaggcgcgccaatgatgaatataaaattgttatttgtttgccaaaaggtgcgcggtgactacctctcgaaacccaccaaatgtaattttcatatctcaaccggtcttagagcagtaaaaggttggcagtttgaaataaaaatttcaacaccccgtatctcg

SEQ ID NO: 14973 - DNA, 402 bp, Diabrotica virgifera
caaatcgtaaacatgaagactactttggttttggctgttttggcttgcgtcgctcttaccgcttacggtaaaaacgtccaagttaatgactttttgtgcgacacctgcgtaacttttgcatcaacagtcaagaaattcgtagacgaggaactcccaattgaagaagtagaaaaagccgcaaaagaactttgtgacctcctaccgggggatttgaaagatttctgcgaaaaagatttgcttccagaagtcgagaatatctacaatgatgtatccaaaataacaccccaagaagcatgccaagatttgggattctgtgacgcttaaaaaattaaaagaattgttgtaatatgcataactatagaataagaaaaattttgaagtagaaaaaaaaaaaaaaaaaaa

SEQ ID NO: 14974 - DNA, 398 bp, Diabrotica virgifera
tacattttgtacaactcattgctgtttgtcctttgcaacagtttcggcatcgtcctttggttgtaaaagttggaaagtgtccgaaaagatcttttctgacatcttctccaggtatagtctacgaatatatgacgtgactacgaatcttctttttcggtgtcatcgataatgtcatcacggccagatggatgacgtcactagtattatgccaaaaaatcgtaatttaaaaataaaaatcgatctgtttcgggaatttctatgtttatttagataaaatctaatgaatttatgcgttactttatagacgcactgtatatacctaatatgtaaaaaatagaatttgataatatgataacatactgtaacatttttttatactaatactttcaagaaatatt

SEQ ID NO: 14975 - DNA, 401 bp, Diabrotica virgifera
aaatttctgacgtcagagcattgccaaaacgttagaatatgacttttcataatgaccatatttcttgtacagtgagaagctaggcattattacttgtcagagatatttttctttgcttttgtttgctgtacaaataatgtctagaattctgtattctaattaaaatgtcgccttaatactataacttgataactcgaaattagtagttctgagataaacgggtttaaagatttttaagatatttgtgctgctaccatgatgttggtaaatacggaattcactctgcagctctaaaatactgttccttaactttttggctactgatctatttaggaatacgatgcaaatttgttttccaatatggaaaataacaagaaaaagtaaagttatcaacttttagc

SEQ ID NO: 14976 - DNA, 404 bp, Diabrotica virgifera
ttctttcagagttgtgactgcatagcttcactgaggatgctgaaatagctatatggagatggtggtccaactctgaatcgaatataaacaaaaactgcctttatcttatttgtttgtattattattgcctcaacatttatggctagacttttatgatcatcatcactggtgttacaactctccttgaatctttgccgcacttactattgccttccatgtttgtcggtcatgtgccactatttcccattatctcactcccattttctctagatccctctctttgtatccctccacctgaaatgctgatagtattgatatcaaaagtttgtgcaaaagtcagagttgtagtctggtattctagaaaccatgaatgataaaactatgtttagaatattggatctgat

SEQ ID NO: 14977 - DNA, 401 bp, Diabrotica virgifera
  SmartBlast Evalue=0.000000002; Info=Reverse transcriptase-like protein n=1 Tax=Glyptapanteles indiensis RepID=B7S927_9HYME
gagaataaatcgatgtccaaatcattcaggcgactcaaagttctatctattggtgagttaagaccatagtttgttgaatcatgaggtacatggaacaagttattatttctcagatcatggtttggaatattaaagtttattaattttaataaatcagggcaattgatttcactacggtcttttaaggagtgcaaattgagatcactacggatgatagtatagttgtggtttagttcaataacattatatcccaatctgtacgctgcaaatcttaaaaacttattttgaactctctcgagacaaacaacatgaacgttattaaatggtgaccagacaatagaggagaattcaatatagatataaccaatgatgagtaaacagcctttatcgtattaagggaa

SEQ ID NO: 14978 - DNA, 402 bp, Diabrotica virgifera
tgaaggatttttcttaaaacttaataataaaataatttccataaatacacatagaccatactgtatgtaaatagctgtagccccctttgaaatcattttgaaaatctaaaaaataagaattttaacgttagaaatatatttcgtttacagctcttctcatgtattcctttttcaaagcctaatattactattaacaaccaaagtgatatggttgactattattagtacagcaaaagatgaaaagtgaaagaaaggcgaaagaaaacattctaataaaccaaaacaaagccaattctcttcaaaacttttgaggtttttaaatcaagcgatttgtttttttttattctttctagtattaaaacatattgtagatttttttttgtatttatagtataagaacat

SEQ ID NO: 14979 - DNA, 403 bp, Diabrotica virgifera
tttatatacgcgtgttttcatttctaagtttaaatgtttgcccatgttgtatcaataaagcattataatgttttacttttaacattggctccttggcctcttcctcgataacttgttaaatcgaggtatttaaatttcattacttgttctaccattttgttttaaactcctagtttgcaccttattgattcttttgatattgttagactttgtagatcatgcttatagattattactgtttctccaataatcactgtttcggagatatactagggcgatccgataagtacttagcctacaaaagaaaaacgaaaatttttgaaaagtgccgatatatttcttaactcctcattcgacttaaatttctgaccggtgatttggaaacaaaagaagtcgcacgggc

SEQ ID NO: 14980 - DNA, 400 bp, Diabrotica virgifera
cattcttctttttgtgtcaattaatttaattcaaaaaaaaatttcggaccccctgtataaataattatcttaatgtttatattactgaatggagaactgaataatcttttaaattagctggcacacgacccctattctcatttaaaaaaatagtcgattacaacatgaaagccgcatggaaagtcgcctagaatatcttctgagcctctatagcaagataattgatggaattttatatgctgtgctaataagcgatatgcctctatagtttcgaaattgttctttgctctgctgatgaaatcgtaatacatagtattgattggcgctagtgacatatatgatatgtctgatgacggcgccgatcggtgccacacttaacgaacaccatattaataagtta

SEQ ID NO: 14981 - DNA, 402 bp, Diabrotica virgifera
  SmartBlast Evalue=1E-37; Info="Dihydrolipoyllysine-residue acetyltransferase component of pyruvate dehydrogenase complex, mitochondrial n=1 Tax=Harpegnathos saltator RepID=E2BI31_9HYME"
cagcatttattagagcttgaaaagcagtatgaaaaaggaaaaccgttggtaaacttagtggataatatggtaaaattggggtctttatatagaactcctcaagaaaaatcgatggccacgccacaaattagagatagacttgaattcaatcagcaaatccaagaaaggcggctccttgcagaccaaaaacgggaatggaataggctgaactctaaccatcatcaattccaagagaaggttcaacaattatacatattagacagattaatacatgaagagtcgggaacacttcaaaaactccaacaggataaggaagatatagaacgtgcgcttgggggattaaggcatcgtctcagtaaggggttcaatgatccaagtgaaatagaaattgctcgtaagcag

SEQ ID NO: 14982 - DNA, 400 bp, Diabrotica virgifera
gccccagcaaagattaaaaaaatcggattgacttgactaagtttctctgtgatagttgatggtgttagggatgtataaagcacattcagtaataacagtacactttaagatatcaatataaataactaaacggcctgagagactataaaaacaccaacatttccatggtatattgtttgaattttggatggcaagtgacaacgtgaaaaatccgtaaaatccagaaataaaaaatagattcgagaagaacttaatggagaactcctagaacagagagaggaaacaatacaagaagaatgacataagattaaaaaataacatgggaaacggctaaaagggtgataggaattaaaaaacctcaaagaaaagtggtttggtttgatgaagaatgtaaacaagc

SEQ ID NO: 14983 - DNA, 402 bp, Diabrotica virgifera
  SmartBlast Evalue=7E-14; Info=Transposable element Tc3 transposase (Fragment) n=2 Tax=Camponotus floridanus RepID= E2AKN2_9HYME
gtttgaggtgggataactttaaatggctgctctgacctagtagttagtcagcgaggggcgatgaaggcagagcggtatattaacgaagatcttgaaccacatgctgtcccatttgctgaaaatatcggtctagaatttatcgttcagcaagataatgcgagaccgcatgtggccaggatagtgcaaaattatttgactacccacaatattcagattatggagtggccagcaacgagtccaggtttaaataccattgaacgtatttgaaatacactatggaagcgcttgaaggatcgtcagccaccaagaaacacaacatgtcgaggaagttatcgtgaaagaaggggaacaactagatcaagaaactaactctaacgagttagaggagcccatacacgctag

SEQ ID NO: 14984 - DNA, 398 bp, Diabrotica virgifera
tgttctttagcctgcttcaattttggattttatttgtttatctacatttttgtacatctgattatctttgtttttatgctgacgtctttcttccattaaatctaagatttcctccgtcatccattagtttctttttgtatctggttggtataagaatttactttttgacatttatctatttctgtctttattaataaccattttgtctctgtctcagtattttgctggatttgttctttaacattcattaaacggttattaatttcatctgtcaggcgttgttttatgtgtgggtttcttagtttacttgtatcgatttttacatctgttgttctgcgttttattatcttcattttgtgcctaattttggtcactactgggttgtgatctgatcctat

SEQ ID NO: 14985 - DNA, 399 bp, Diabrotica virgifera
aaaaattcttcaacaggtccatttattaatcggaaaataaatactgatagaggggcatttcaaatttcaaaatcagtgatcttacgtgttaccaaagaaaattttggaatgcttcaatataaaacatcattcagcagtgacacttttcaaatggttgacttaagacgaaataaaagaggtgatatcattttgccagaaactttaccacaaatgaatatgcaattgattcctatatcaacaaaaaaatatagtgatcttatggacttactcttatacttgccatcctattgccatgatttctataaaaatctgccacattcaaacgaagaatccgagtaccataatgataatgatgacatgtaatttgaaaactgtatgttaattttaactaaataaaat

SEQ ID NO: 14986 - DNA, 400 bp, Diabrotica virgifera
gtttttatgataacaaatctaggatttcaatatatttcataattttagccagctactgaaaaatgatactatagtcgaaaaaccgtcatatcgattgatcttgccgcacgtcttatagcataacttattttatactacattttatacttcgataaggcacgtttttacacagttttaagcaatatggaatgtataaaagtaccacaattaaataagcaaacaaatctagattaaaatatattatcacattacaaaatttttaaatccatcaaaacacttagtccttgtttttatttctctatgatccaagtaatgaagcttaaaataggacaaaactcgcaatttttagagaatagatcgatttccctgaaaatccaagaacaagcagtagacagtccaa

SEQ ID NO: 14987 - DNA, 401 bp, Diabrotica virgifera
cgttaataactgggtaagaaacagaatagtagaatgaaacgactacataagccgaatgacaacaaatatatgagttttgttatgctctgctttctctttatttagattgattagcaaattcttaatttaattaattaatctaaataaagagataaagtagagcataacaaaatggcgcccaacgtggggccattttgttatgcgacagtgacaacagcgaaagacagttccccaatagaaagacgattagtggaaagaccacgaaaacgatggaacgacaacttgctggagacacattgaaaaaacagacagtcttctctgcacaaaaagaagaagaagaattgcgcgacagagttagatctgcacgtagttctgcagtaaatttttaaattgctgctttg

SEQ ID NO: 14988 - DNA, 402 bp, Diabrotica virgifera
gctggctaaatggacacagctcccaaaggccataaaagaagaagaaaaaaaaataaacaaacaaaaatcttacataaccttctatatgacattactttgacacttacattacagatagttatctttgtttcacactcttaaagacaaagagaaacagtgtaaccagtagctgttgtcgtaaatacatatatatcttttttaattggcaacagcgctttcctgataaacttgacggtagagaaaaaactaatatacaatatgaggaaaaatttgttgaatttgtttgccgacaagtttgtaccggtgagttatgatgtcattaaatctatgcgtgcattcctaattgtttgacttttagtttataccaattgctgcctcgttgaaacgagcgaaacggctgtg

SEQ ID NO: 14989 - DNA, 401 bp, Diabrotica virgifera
gccggggtaaaagacagtttccatcaaaaaagccaattcgttaatttatacaggaatactcaccaaagcaaaacttggaacaattttaaaatataaataataagtcagttaataattgaagttaatgacagttaataacatgaaataatactgtaggaaatgattttctactattttaacgtttaaaattttcaattaggcactgaaggatgtaaatacagcctagaaaagtcaaaaagttgacgtcattaacaaatttgagcaaaaacgatggatcaatgtggtctcttgtctcgagaaagaattgctacgccacttgtcatcaaacttgatctggcattttataattctcaaaaattattaactctatttgcggaaacggcccacttttttagtaatag

SEQ ID NO: 14990 - DNA, 401 bp, Diabrotica virgifera
  SmartBlast Evalue=1E-16; Info=Vacuolar ATP synthase subunit e 2 n=1 Tax=Camponotus floridanus RepID=E1ZWF8_9HYME
cgcgacaattggggcaggtgtgtgagacgtctaagcatttatctatgcagcatgggatcaggcagcaaccaaagaagcatcctattaaacaaagtaccgcactagaaatgtaggcaatacatccaggcgatcgtttagttgtagtatcgatttcagcatggcaatgagggcatatcatatgtgtcgggtttggtcccacaggaacaacagttgttacgatttctggaccttttacgaaggaatgatgaggtacataaggactggagggcggaacacccccgacagcctgtgcgtagctaggaggagccgcttgcggtggtccataaggaggcggcatcatataattattttgctcattttaatccacaacaaaagaacactagcactaaatatatcgttta

SEQ ID NO: 14991 - DNA, 392 bp, Diabrotica virgifera
aggtagatcagggggaggcctatatgcaggagcttcattaccaggaatcggtgctgtagcgggcttggatggttacgctggtcctgaaggttacaatggtagagtgtatccgggactttctagaaaagagctaagaaaaaggcaacggttaattaaacaagggctacttccaccaaatgtgcaaacttatgtacttgaagaaaataaattcccagaggaacaagtaccagatacctacatcatgaaagtaaagaaaactaacggacaaaaacaatcctccaaaaagattaaagaaaaggaaacaagtatcgaagaggagttgatgatggtaaaaaagatgataaaatagaatcgaaaacagataacgataaaatacctgaatcaaaaaacac

SEQ ID NO: 14992 - DNA, 398 bp, Diabrotica virgifera
gtacagtagaacgtcaataatccggattaattgggaccggaccccatccggattatcaaattatccggattatcgaaattacctcaaaaaaaggccagtatacacattaaagtacaacaaacgttttaaaattttatgttttctcttgtacagtaaagtgtctagaggtgaaattaatcaaaacatttttttatgtttaaacactgtattgtaattaatttataatagcaccatgtgtacagtaaaaacatcagacactatttgggcttttaaaaaaatgtgtaaaatatttttgaactgcggtagaggttcgtttttcgcagcgaagttcttaatgtattttaaaagaatcagatatttttgctagatacaaatccggactattgacggtccggatt

SEQ ID NO: 14993 - DNA, 399 bp, Diabrotica virgifera
aagaagtgagatttgtattgtatgaaaacggaatttattgatttctttattattgtgcgcgtatttagtgtatcttatataaagttagagttaaagttaatagtattaaataagtaatataacagataataataataggtttatataggactttcatttgacaagtgattcaagaaagtcagaatcatcaaggaaaatcttgacaaaaatcagaataaggaaacatggcattcaagttaaattacagttttgaaggcatttctaaaactaagcctgaacagaatttatctggagccagcaaaaaattaacaaaggatgtattgttacagaagactcatgaagaaagaagaaaacggcaagagcaaagactcaaattacaaagtgctgaattgttgcagt

SEQ ID NO: 14994 - DNA, 400 bp, Diabrotica virgifera
agtgacttgattagtaagtacttcagtaccattcagttttaacctcgagatatcagatatttaccagcaacttcatcatggctgatagagattcaaaggcaaatactgacaatcgggccacacagctaaatgccaacaatgacagattctatcaaagtagagggcttgattctaggccagataattggaaggatactgcttcagccggtggccaaggatatacccaacaggatagagacaacagatccaatcagctgaatcccaacaatgacgcttatggaaaatccaggcaaaattagcaaatatttactaacgccaatgcatattaatactgtgtattttaattcatttttgacatagtgttactttaatatttcaataataaaatgaatttataacc

SEQ ID NO: 14995 - DNA, 398 bp, Diabrotica virgifera
tcaataacacaaaatatcaacaagagaataacaaacaaggacaggaataaaataataaatacaaaccaaaaagtgaaattaaatctgaaaaatcgatgaaaaattaaaattaactcaatgatgaacgagaacatggcaccccacataacagatatccgttatcgaatatattaacttaaactatagaagtggattaagaacaagacttaaaagatcaagataaaaaattgtctagaaaaaagtgttttatcctcttctaaaaaaacttttttttattgttctgaagctatttctttgtggcatcttatgcaatttactattttacttgtgaaacaagccacaacttaagttgaaaactaatttcattgacgtttcgactaaacagctgtgtttcagcg

SEQ ID NO: 14996 - DNA, 399 bp, Diabrotica virgifera
gagattgtcagatggtttgattttatcatcttctttttcagaatcgtctgactcagaaaaattgtctgcagcatcattatccagttctgccaatgatccaattcctaaagcatttgcagtgtcctcattttcgtcttctttatcgtaatcctctaaggcaaactcatctgtttgagacgtttcaccttcttccataggctcatcttcattttcattggattcttgtaatttaatcttggtgtcattaataatttgagccagctcgtttttcgacagttgcaattttactgggcttgaattggccactcctcgtttaacccatcttacacacggtacgaagtttatattttgttgtgtattttcgtacttccattttcgaatattaattcacgtgttgat

SEQ ID NO: 14997 - DNA, 397 bp, Diabrotica virgifera
tgactcattgacacgggtcaaagagtcaaagtcatatatcagtttcaaacgacaacgtcaagtgtcaaagcccaaaatttgaggtatgataatatcaactgcaaatgtactttacaaaagcgccactttaatagaaatagtatgcttccacctcttacaacttacctctaaagagtttagatgccaattagtccgtaaataaaaaatgtatatagaaaaagtgtagtcttactttgtggatattaaatatattctagtcgctaatatcaaagtctaaaataaatataccaataaagcatcttcgttcaagctctgcgtctttacaaaatggaaaatatacaaaaatgagcgcattgagacatagaagtaagttatcgcctcacgttatcacaccaat

SEQ ID NO: 14998 - DNA, 398 bp, Diabrotica virgifera
atattatgaagatgggggaattttacaatttataatttacatcccaattcattcacattgatcaataaaaaactgcataagaaaaagtttttcttttaatcttacatgggatccctcgctctcttcatagtggtaatttgacattattgacgtaacttaaatattgtatcttcagatgaaataattaggacatttcgataattagattttgataactattaaatatgaactgacataactataccgggtggaccaaaagtcagttaacgttatcaaaaaaagtcacgcgcaagtttgcggcgtctccaagaaaatatatcatgctctgtgaagggccttgcaaataatccacacttacaaggtattcgatattttcagcaagacggtgcactgcctca

SEQ ID NO: 14999 - DNA, 390 bp, Diabrotica virgifera
ggtgcccagatattcattattgttctttaaaagtatttaaaaatgataaggacgtgatgtggactgtggtaggaaattatacggagggtctattgtctaagtcttaacctctctggtacataacaatctattctatatcaattttattctataacaatcagaacattctacagatttttcaaaagatcgttattatcattttgttgatatacagggtgttagtaaacaagtataaaaaactttaagggccaattccacatgcaaaaacaatgccggtccgttctataaacatatgtcagcaaatgcctcgtttccgagatacggggtgttgaaattttacttcaaactgccaatctacttatttctccaagaccagttgagctatgaaaa

SEQ ID NO: 15000 - DNA, 399 bp, Diabrotica virgifera
gtccctgatattgtaactatggtaagttagaaaagtgataaacctatattgcttatcaatgtttatatttcatattttttatatatccaatatcaaaatattccatatgtatcataatatgttattttggtttattaatatgctataataaaattaatgaaccaaagcattcatatctattaaccaaaaatgagtaattcgcttaatcagtattttagcattacttgcaaatcgttttattatattaaaaactgtctttcttgtataatgatacaatggttcccacatttaatccacactctttgacttttttgtttaaaaggggccagcaaaatgtaataatgtcaaagatttatgaaaagtatttaaagaaaatcaaccattcaaaaagtgaatagt

SEQ ID NO: 15001 - DNA, 399 bp, Diabrotica virgifera
  SmartBlast Evalue=3E-39; Info=40S ribosomal protein S21 n=2 Tax= Cucujiformia RepID=D6X125_TRICA
ttgacgttcgcgaacgaatccattttctggagtttataataaaataaaattataaaagatggaaaacgacgcaggtgaaaccgttgacttgtactgcccaaggaaatgctctgccagcaacagaattatccacgctaaagatcatgcctccatccaacttagcattgctgatgtagatccccaaaccggcagaatgaccgaaagctctaaaagctatgcattgtgtggcgctattaggagaatgggtgaatcagatgactgcattgttaggttaacgaaaaaagatggaatcttagcaaagaacttctaattccaatgtttgtgactatggatgaagaaaatatattgaatatgtatatttactttattcattaaataaacagttatttataagtttta

SEQ ID NO: 15002 - DNA, 398 bp, Diabrotica virgifera
gattgaaatgacaaaagggtgaaattttgacagttaaaaaagaaaatgtggttacttacgtccagtgtacaagtaattgaaactagccacttgaataggtgtaaaacctcaaaataacattattgctacattatgagctgtatagtaatcgacaataagtcgatgtcttaagattaaaaatgtatcacatgtggatgtatgtcatccttgctcggaattagcacaaggttgtgatcaggtgagaggttaacaaccaactgattagacagattggtgcctgaaaattcatgacaagatgtcaaagaagataggtggatttctcaaatgtcaaccgaaaaatttttgacaatgtgcattaatatttaacttaattattcaattgtgaatatgcaactatt

SEQ ID NO: 15003 - DNA, 397 bp, Diabrotica virgifera
atggggcacgctgtattttcctgtcaccgtgtcacacaaaaaattggccagcgcaagtacatgtaataattattgttacatgtacttgcgctggacaattttctttgtgacacggtgacaggagagtgcagcgtgttttatatgttcgttcatgggtatctttcatttttccgactgtatacatttttcatgcaaatataataccataacaattaaaattacattatttagataaaattgattctacacaggcagcgttgtaactcttgaaaatgattttgttatatatgggctccgtgcgtgaccatggtggggatacacgaaactatgccagcgcccgtagcggcgaaatatgagaactttggcgaattcttcttcttgatgtgcctatccgtga

SEQ ID NO: 15004 - DNA, 399 bp, Diabrotica virgifera
acaatcttctactagatattgtattactttcaacttaccagattgagcagctttatgaacaagtgtttgtttttgattgttcgaaatgtttagatttgccccttgctctttaagatattttataacattcaatgatttatagcgagctgcgtagtgactgattgtatctccattcccatcacataagtttaaatctatattgtattctgtatctaaaaattttaaaaaatccactgtagatttgtcgaacacgtagaactcgtcgtcgaagattttcctacagtcttcgaaggtgaatgttagaataataaaaccgatctcattgactttattgacccttgctccaattcctacaaaatattttagaataggtaggtgggaaagttcactaaatcttag

SEQ ID NO: 15005 - DNA, 399 bp, Diabrotica virgifera
atctcgtttatcttgcattgcaatacattaaataaattatctgagaatgtaaatatttctgaaaaagcaaagttaaaaaactccaaaaatcctctcgagctatttatggtttctgtatcccacttttcacattttcgccattctccaaaaccctaatacatatatttatataaatatttagtatttataatataaataattctattatattgatttatataaataactaaataaaatcaatcttcataattccacaaaatcagtcgaagaagcccgtcattgtcaaatgctggtaaatcacatttaaatgcacgaaaacagctccttgtatgcaattgacaaaattgcttatcttataagcgatagatatgcccgaaatttgaactcgccactctgcgt

SEQ ID NO: 15006 - DNA, 399 bp, Diabrotica virgifera
ataagtatttgatgaaaatattaacaacagtacttctttatgttcttgctaatcttgaatttgtttacgacaatcataaaatatgtattaattttgaaaccaaaacaaatcttaatgcattagaggtttaaacgcaaattgcacatagtcgactgacgatacaagaaataagtagtcaatacatacttggaataatcatcaatcggcctttaacccgggagcagtcgcgctcacttctgtaacgtaagtagtcgcgcgtagagaaaaaatctcacaatatgaatttaaaacaaatttccattttataatatttttatttacttgttatgttaaaaatatctatttctaacaattttaaagctaattagttatcaccaaagccataaattctacaaaaaa

SEQ ID NO: 15007 - DNA, 399 bp, Diabrotica virgifera
  SmartBlast Evalue=6E-38; Info=Putative riboflavin kinase n=5 Tax=melanogaster subgroup RepID=RIFK_DROME
atattttaaagattacattaatgttttcagttctaatggctggaaattcaattgacggattgccccattttgctcgaggtgaagtggtaaggggcttcggtcgtggatccaaagagctaggatgcccaacggcaaatttaccactagaagttgtcaaaaacctgccggaaaaaattgagactggtgtatattgtggattcgcttctgttgagggtggtcaagttcataagatggtgatgagtgtcggttggaacccgttttacaacaacgaaacgaaaaccgtagaagttcatataatgcataaatttgattcggatttttatggaaaggatgtgcgtattgtcattttggattatcttagacaggagaagaattttgaatcattggatgcacttaacg

SEQ ID NO: 15008 - DNA, 398 bp, Diabrotica virgifera
aggcaaaatgcaaaggttgcagtgtataggcctatccgcgctgcaatctcgaacttacccagagggggaacgcctgcgcattacaaaattggacgttcaataaggtcgaatttttccctccgaaaacttaatgcgcaagcgatctccctttgggtaagtttcagggtctttaacgtgtgcagtcgagcctctattggatcggggcattaaaaatagtgatgttgattatagttactttcgagtattcgttacaaatcgttacttttgtataaagtaatcatttacagtattcgttactttgattactatgattacttttgttacttttgtatttgagtaccggtaatcatatcgagaatcgtatttctcagtaggtaggtattttgtataagtattcc

SEQ ID NO: 15009 - DNA, 393 bp, Diabrotica virgifera
attttgaagaaatttgagaaaatgtttcagtttaaagcagttttaaaatcgggagggtttttcatattatcatgtggagcctgtattataggtgtttgtgttataggtgttactgtaattattgttgcggtccctagaacatcatccaccgaaaatgcgacaatagaaccggactttaaaagttctataagcacggaaatatcagtatttacaacacagacggaagattatacgagaactgattcagaaaataaaacctctcttactacagaagcatcagtatttacaacacagatggaagataatacgagaattgatccagaaattacaacctctattgctacagaagcaccagtatttacaacacagatggaagataatacgagaactgat

SEQ ID NO: 15010 - DNA, 395 bp, Diabrotica virgifera
aagatagaaataggtggaaatttttacgggaggcctacgttcagcagtggacaaatataggctagttgatgatgatgatttttttattaatgttccgggcatatttgagaaggagcataagtcaattataattaacgaagttatcacccaacttcatccgcaaaaatccgaatgccacctctcacatccacctaaaaacagatccttcctggtctatacaatcaagttgattattgaaccagcaaccaagatatttgtattgatttacgtattcaagctgttgatggttcatatctattggaagaggtaaatttgtgttccttgccaaacaccaaatttcgttatgtcattcataatttgtagctatcttcatcggaacggactcataacatagt

SEQ ID NO: 15011 - DNA, 408 bp, Diabrotica virgifera
gtatagctttaagtgaattattactagctgccaagtgacttggtgtaaatccatcattatcaggtaagtttaaatttaaggaaaaatttaattatttttaagaaaatctagaacgtcaactgcatcacctgcagcagccaaatgcactaaagaccatccgtgattattacattgatttaaatcacttccaactgatttaatgatatcttaaaatctcaactttattagaaagagctgtcaaatgagccggtaattcgccatgatctgtagaaacgttaatatccattttacaattttctactaaatactgcagaacctctaatgcgcctccctgagcagcttcatgaataggtgtacgtttatttttgttggaaatgcttaggcttgccccttgatcttttagatacc

SEQ ID NO: 15012 - DNA, 395 bp, Diabrotica virgifera
aaaatttacaaaagaaataataaatatagaaataaaatacttgaaggtttttaatacaattatcgaaaattcacatcatttctccgattgtgtctggtcacagggtcgccgcatcagtttttattccagctacgctgattctaaaactaaggtgaagtaaaatatcgagcttacaattgaatcaaagaacacaataaatcaagatcactggaaaacaacgatgatagttatttttagtactttttggtcatgtttctgtttaaattttgttcccatacaagtacttgtacaactcagcttcaaattttacggttttgatacaattgtccaagattctggttgtttctatgactgtttttttggtgcaaggctgtcgcatcatttcttactataac

SEQ ID NO: 15013 - DNA, 394 bp, Diabrotica virgifera
  SmartBlast Evalue=3E-29; Info=Rootletin n=1 Tax=Camponotus floridanus RepID=E2B1W1_9HYME
cgaagatatcaaagtgagcctagaaaacgagagaaatcgacttcagaaccaaataagaaacctggagactgaacagctacagatcgaacacaaggtccaagggctacaagaagaactacagcgaactcaagcagcgaattcacagcagcaaactgaagagaaagaactacaggctaggttattgaacgaggttgaagaacgggaaagggcacaccaagaagtacatcagtgcagaaaacagatttcagaattagaacgcaacttagaccacacccgcctggatttaaacaaaacaagatctcattacggtcagttagaggagcaatggcacgccagagaacaagatcttctagtccatttggaagatagtaaatcaaagaaaaacgtttggaag

SEQ ID NO: 15014 - DNA, 394 bp, Diabrotica virgifera
atgcgcttaaattcattaataaaatttagattaaaccattacttgaactagctttacaaacaaagagagcaacagaatttgaccaaaaaatatatacacctgcttatgagatcagtcagtggcgtgaagcatgtacgtgatcgcgatcatgactgggacagcgatcacataatagggcttttcattcacaatcatttgtttcgagcttctgtcatgtgtcacataatattaatatacagggtgagtcatgaggactcctacctcgtatagaggcccctatggggaataacaaatgaccactcaaaaagtgtctgctcccattgttcaataatatacagggcgagtttcgcactttgacagaaatttacattcgtcacaatctttgaacggtcag

SEQ ID NO: 15015 - DNA, 397 bp, Diabrotica virgifera
agttaaacaaaatgtttttgaaacttttctgcctcttagtacttttttgataagccagtgtttatcgagctattttgaatatttgtcgaatccaccacatatttgtatatggatggttaagtacgattatagagacctgttaatctgaaaatgtatttataatttacatttttaggtatattttgaaaaagaagtcatatctcgataaaaggtgatttgtcaaaaaaagagtaagaggcaaaaaagttttaaaaacactgtttttaactaatggtatcacaataatagtgcaattggaacgtacacaaatatttggggggttcaaagggacaaaacccccataaaatttttatgtaaatatattaaaaaagaagccgaatctcgataaaaacttgct

SEQ ID NO: 15016 - DNA, 398 bp, Diabrotica virgifera
ggcgctagttacacggatcgtactaagtattagtcaatataacttttttaagagtataattattaatcaaagtttcaagtaaacctaaacatcattcaattttacacgaaaaaggtactcttggtaaaactcgatagtgtgtaccgctttcggaatattttgattggaaaattatgaagtaataattgatgctggtagtaatgataaagttctaataggtatacctctattttctccaagtgtgccatggaaatctgacatttattgattgttatgacgataaatcaacaataattagagtttttaaaccttgtttcaatttttcaattttcaaaaaatgcgtaaaatccctcttccgtcaacgccctgtatcctgagaacggacggcgctacaaaaa

SEQ ID NO: 15017 - DNA, 393 bp, Diabrotica virgifera
tatatatatatacatacatatatatacacatatatatacatatataatatatatcaaacaaatgaaatagagaatgtggaaaaatccccttacgaacaattcacacatccaccatttcaggttgggaaaaatttcttgaatagaatcaaagatccaaacacctgttcttagaaatgtgtttcgccctcttcaacctctctgggcttatcaataaagatgagaggttgaatatctttagacacattccatcaaaaaacaacattcgagacccagacatagcaggagcgtatatctacgccgcataatctgaccatgacagcctcacgttttaattccctaattactataagtaaaatatgtgtttgaaaaacaaatatatatatatatatatac

SEQ ID NO: 15018 - DNA, 397 bp, Diabrotica virgifera
ctgctttattattttatttttaatactggttgccaatttacattgttttaagttgcacagttttgttcatcaggtctagagatacagggcaattgaaatattataaaatgttgaaacgagcttaagctgtcaaaggtcctgcacatgtacaactgactccagcagcgcagtatccagatttgaagccttggtttctgcaggaaagtcgacattccaggttaatacatgctatgtcgggattgttctctttgatgatatctataacttgttctgggctcaatggtgcttgttcttcttgggcgtaagcgcagaaagcgactgccaaaaccaaaaatgcaattgtgaatttcatttttcgaatattcgtaattttcgtttagccaaaagttgacttact

SEQ ID NO: 15019 - DNA, 397 bp, Diabrotica virgifera
attcaattcatttatttgcttactgatttacaaatattgtaatatgtacagtaacctatttatacgaacagaaggagatataactgtcgatgatttccttgttttttgggctgtgatcggtagcagcctttttggcagtagatgtgagagtgtatttcttatcatttttggttttcttggaaagacgtgttaagagtttcttaaaacgtttgcgttcttgtaggtaggtatccatgaataaatgcatttttgctggaccaatatctttaatggtgtttaacgtatttaaatagtaattgaaatcataattattgatttaattcaggtaccacttctaaaaataaatacacacattcacataatttgcgcgtgaagtgaggttgtcttccttgttcgt

SEQ ID NO: 15020 - DNA, 389 bp, Diabrotica virgifera
gttcggggtagtgttaatgacgaaggcggccggtcggtagcaaagtagtgtgtgaactgttgattgttttgcatcgtttttattggttatattacaccactgtgtattattcaccattagtgataatatcgaagatcagattgagagcagagatataagaacgtgaaaagaacgtgttttggaaatgattttacaaatggaagagacagagaagaaagaaagtcactacaatgttgtgaccaaaagcatatataataaattaatggtcgaagtacaagatgcggaactgtctgccaagaaaacaccattacaaaatcgaagactaaaatgatttagaattgttgaagttaacgaaataataaagttagcttctaaaattgatcccatca

SEQ ID NO: 15021 - DNA, 392 bp, Diabrotica virgifera
ttagctccctagatggtcccaggggtctcctgttgcaaaaaatgtgttgtttcgaaaaaaaaaattcctgggcgatggctttattttaaaaatctgaaaaaaattactaacatacattttcatgcgcgaaaacactattgatttttttttgattttttggaccataattgaccatcatcatcatcatcatcatttggctctacaactctatgtgagtcttggccgtgtttactattgagcagctatttcccattgctgtactcccattttgcgtagatcactagctactgcgtccttccatctctttcttgggcgaccaactgaccttctgccattgggtctttcccagaatgtggcgttcagaagtctttcgtcacttgatcttagcacgt

SEQ ID NO: 15022 - DNA, 394 bp, Diabrotica virgifera
ttatgtagttttgaaaggactgaatgaattggaagtaatgtatcttgatagtctaccaacgtggaatagtgaataaaataattagaatgagagctaccaatataggtcaaattgtgggttggtgtcagtatgtaaagaagaatctaaattgaatgggtatatgaaatagaaaagtatgagattgatttctattggtgatagtggagtaaatagactgaactaaatgatatatatttaagtgcacaaactttatgaacgtatgtgattgtaactgaaatcaaacaaatgcaaaaatgtgaaaaaatttttatttaaattgggataaatggatattggaagttgcctgatatgaatggaaatgaaaagatagatagaaaaaagaagaatagtgaat

SEQ ID NO: 15023 - DNA, 396 bp, Diabrotica virgifera
caaaaatgtggtacaaacactaaaatcattattttggtctcctaaaagtagtttactaacaaaagtgagaatctacaagtcggttgtagaaccaattttaacctaatgatctaaatgttagccaatgacaatgaaagagaagaaaaaactggaagtcgtaaaatggactaattattaagaagtgcgtatcagatatccagaattgatcacatcccaaatgaagaaataagaagaacaggaaggatttacaatgcagtagataaaattgaacccaaacaactcttgtggtacgagcaagtagtgacatgtaacttaaactatgttccaaggaatagaagaaggtaaggaagaccattagaatggagaaaagaattcaaaggaataatgagagatata

SEQ ID NO: 15024 - DNA, 396 bp, Diabrotica virgifera
tggtatctccttttcttttgttcatcttttagcttttttattgctattctgctgtattctatctgttcttgttgtaccggttttcgccatgtcatctctgccattaccagtctgtgatcagttccgatctctgctctctgttctgtccagacttgttttatattttgtttcatttcttgggtgtagactacgtaatctattatgctttttgcatctctgccttctgctacaaatgtatatttatcttgtagtaattgctgtgtaaacgagtttcctattaataggtcgtttgtctggcagaatctgatcattttaattccatttctgtttaggatctcttcaccatgtcttcccatgcacccaagtcctttgttttcatcttttcctatccttgca

SEQ ID NO: 15025 - DNA, 395 bp, Diabrotica virgifera
tccaaggataggactaaaggtaagaaattagacctattgtaggttgtttgtccgtctgtctgtctgaccgcgaatataactcctccgtcattataccaggtagaatgacaaatgaggtgtcaaatgaaagcttataatccaaggatggtactaaaggtgagaaatttgacctaggctgtctgtccgtcgatccctccgaccgcgagtataaatcctccgtcattataccaggtataatggcaaatgaggtgccgaatggtggcttatggttcaggcatggtattgaagatgaaaaattttacctaggctgtctgtccgtatgtctgtccatccgcgaatacaactcctccgttattaatacagatagaatgacaaatcgggtgtcgaatgaaagc

SEQ ID NO: 15026 - DNA, 395 bp, Diabrotica virgifera
agcattagtaacaagcaaaactaatcgttcaaaatgatgctaaaatttgtcatcgtttcctgctgtgttgcactagcacttagtcatgctgttggaaaatgtcccagtgtagatggtagatatccagtctaccttccagattcaagatcctgttcaaaattctatgaatgttcgaatggcacaccatatcaattcaaatgtgcgtatggtacatatttcgacagatacagcaggtatgcaaacataaagaagatgtctattgtggcaggagaaggagagattaggccgtaatttgaaaaaaatcatattttctttaattttcataggagctgtgtaacacataaagttgaattattaatgttacaagttaaaaccagaataaaaaagtaattacg

SEQ ID NO: 15027 - DNA, 395 bp, Diabrotica virgifera
  SmartBlast Evalue=0.000000009; Info=WD repeat-containing protein 6 n=1 Tax=Harpegnathos saltator RepID=E2BQG6_9HYME
tattttgttatctggcaactttgtagtattttctgaaaatggtgttttatacttttacagtaatacaaattggattccagttaaaacatttgaagacctaaaaagctatgtggttatgaaggtgtctagatgtaaaaaattgatagcattagctggtttcactggtcaaatatacatctacaaagaaaaccaaaatactttagaacaactttattactttcaatcaaataacaaatccaggataatatcccttcattggttaacttgtgatatgatactaatatgtcaggatggaggaaaactgaaactattatatttaaaaccttctgaaataaatgaagtatgttcctttacattgccaaagagttcacaaagaatttcaaccacagcgatca

SEQ ID NO: 15028 - DNA, 395 bp, Diabrotica virgifera
tcagtcattaattaattttttaatatttattttctgcagaatttacagaataaaaaaacgtaaatttggtataccaattattgtcattaagtaaaatagcagatgttggacggcaaaacaagcgtaaaactcttaagtagtgagaaaatatgctttttctcatgagcatttttcagtgcgtcacagtttttcgatttctttctaaaggctgtatgacactatgcattctcttgtatcacctccaatatcgtttctgatatgtcaaaaaaatgtatagtgtcatacacagatacaagaaacgatatcagaaacgatacaagaatttgtgtcaggcacagattcttgtacaataactgcgccaatttctgcgcaaagagcaaaaacgtaaaacctgc

SEQ ID NO: 15029 - DNA, 394 bp, Diabrotica virgifera
ttcagcagggatctttcttggaccaggtgccttattattttttaaccatttacatattatatcttctactacttttgatgatattggtataagttaggctaggatatttttattattggtttcgttgttatctttgaagtttggtctgtcttcatttaactttctctaactttctgtgtttcagaaatcatgttacacttttgatgctaggctttatttttatttcgacatattatttgaactttggcttttgtcttcttgtacatcagttttccagcgcccttcttcgtattcaaaaatgtttggtgtttatcgcttttattttctatttctcgttctatttcttcatccctccaatacgggagtcttctctggttctgaatttggcgtttta

SEQ ID NO: 15030 - DNA, 394 bp, Diabrotica virgifera
gtgtattcttaaagtaaacatggtgaaatatttagtgataggtatttttatatcgtttagttttatactcaataaatatgtttattgtgcaaatataccaatatgtctgaatcccaaggaacagggaactctagttgcagatctgcagattgaaaaaaatatgtttgactcaatttatgttcgaataccagaaagcggttttcttgatgctgccatatcatgcataaagatatacgatataggaaatagtttcgctgtacctgttataaatgatggcggtcttggattcccatatgtagaaatctctatagaacaccgaattctaaaggaactaaaatataggatacaagtgtttaaagaatatcattgacagttctgataatatattctttaa

SEQ ID NO: 15031 - DNA, 395 bp, Diabrotica virgifera
  SmartBlast Evalue=7E-17; Info=Eukaryotic translation initiation factor 3 subunit G n=1 Tax=Tribolium castaneum RepID=D6X2C9_ TRICA
tcttccaaatcagttctagttgttttttcactcaaattatcaattttaatagcatggtatttagcagctcgtttagttacattagacccaccagtttttttcgcccttttatctcttaaattttgaggcacatctttggaaccttgtttatcagtctcaccaacagctgcacctccaacagctggtatttccttatcatctggcggctctccaccaaccaacatagtgtccttccgtggacattctgtagtacaatactcaccgttacatgtactacatttaaaggatttattatcacccattctttataatgctcaaaaaattacggcttcgggatttcaattcaatgcctcctatttttttataatcctcacctcatttcaaaatattctgtt

SEQ ID NO: 15032 - DNA, 395 bp, Diabrotica virgifera
aaagctaacaggctaaatcaaaatttgcgcaagttcctttgtgttttagaacagtgtttagaatgtgatgtttattattgtaataagtgttctaaaggaatatgttttaagaattttatgaaaattctgatacaggtttgaaaaaattattagaatatcgattaaagactgtatacacatgtaataaaaactaaaaagttccctcaatttcatgttgatcattgacgcttttatgtgatttaatttattaataccctttcagcgccggtgaaatatttcctgccttatcgcctgtgccggaagaaataatttcctttgaatacttacgtgccgtggacgcggttgcgcgtccacggcactgctcaatagtcatctttggactcgcgtacgcgtca

SEQ ID NO: 15033 - DNA, 394 bp, Diabrotica virgifera
  SmartBlast Evalue=1E-15; Info=HD domain-containing protein 2 n= 1 Tax=Harpegnathos saltator RepID=E2C1G7_9HYME
gataacataaaaatataggttaagttaggattttgcaattttgctactttagggagtatttaaggcaaattttgcggctgtttaggttagcccctgaagtgtaattattttactataagctattttataccaccaattgagaaatggaatctttaaatcccgaggatgttttaaagtttttagacctcattaatacactaaagcacagtagtcgtagaggttgggaactttgtcatgttaataatcatgaacaaattgctggacatatgtatgccatgggaataatgacctttctactgggaaatgaatcaaagttggatagatttaaatgcctacaactagctttggtgcatgatttagccgaatgtatagtaggagatattaccccccacga

SEQ ID NO: 15034 - DNA, 394 bp, Diabrotica virgifera
  SmartBlast Evalue=8E-48; Info=Pre-mRNA-splicing factor ISY1- like protein n=1 Tax=Harpegnathos saltator RepID=E2BJ72_9HYME
caattttaaaattcaaaacattttaaatcacttatttcaggtgacataaaggattgaaatatggcccgaaacgccgaaaaagcgatgacaacattagctcgatggagagcagcccaactaggagaaatagataagcacaaaaaacgaaggccctatcttgcatcagaatgtaaaaatttacatgcttgtgaaaaatggaggatgcagatcataagagaaattgccaagaaagtagctcaaattcaaaatgctggccttggagaatttaggataagagacttaaatgatgaaataaataaactactgagggagaagaggcattgggaggatcaaataaaggaattgggcgggcctgactatcagagagttggacccaggatgttggatcatgaag

SEQ ID NO: 15035 - DNA, 396 bp, Diabrotica virgifera
  SmartBlast Evalue=9E-14; Info=Endonuclease-reverse transcriptase n=1 Tax=Bombyx mori RepID=D5LB38_BOMMO
gccggggatgtcaactgcgatgtgtgttcatgtttcattattttcgagaaggcatttgacaaagtgccacatgggaaactaatcgatatcctaaaaaacatctggactcgatggtaaggatataagactgatctcaaagttatatcttcaacataaagcaacagtgtgattcgaaagggaactgccctagatcttcacagtcggaaaaggagttaaacatggttgcatactgtcactagcattatttaacatatagtctgaaaatatctttagaaaaggcttggacgaatcagatggtattgcagtaaatggccaacttataaagaatattagagctgcagactatgcagcattgctggcagatattgcgcagtaatgtatgtatcacacaaattt

SEQ ID NO: 15036 - DNA, 394 bp, Diabrotica virgifera
  SmartBlast Evalue=1E-43; Info="Sialin, putative n=1 Tax= Pediculus humanus corporis RepID=E0W365_PEDHC"
taaacttgggtagctgcgttaacatggtgtagaatccccaattttcactaaaatgcgaaacagtaatagcccatactggcatagaagtaacaaaagaaccccatggtatcttcatttttttgctgctctttgcttctagagaatttatgatatactttagttcctgttcagttatgtttctgtcgtcttctggagaatcagttacaattaccatccaagccaggcaccatatcaaacccaccgttccaaaaaaatagaagatactgggccatcctagtgttgatgccaaaattgaacagagtggcatcgatacaactgttccgatgtaactcccagagaaagctattgtagctaaacgacttcgttccagaggtggcgcccatctagcccaaat

SEQ ID NO: 15037 - DNA, 392 bp, Diabrotica virgifera
  SmartBlast Evalue=2E-26; Info=Farnesoic acid O-methyl transferase-like protein n=1 Tax=Aedes aegypti RepID=Q1HQX5_ AEDAE
acctttccaaccgtgtgtgaactcatatgataaactctgccaatgtacaaagtttctccatcggctgtttgccctccttctagtgcgtctgctggaatattactgcccatacatggtttccaggcgaatttatcttgatttccacacgaaacctggaaacgctgaagtcgtatttcgcgtccacagtaagatacgtaggccaaatttttgtttggaataacttttgctggaagccagtcaccttgatgtaaagctttgccaacatagatttgatcaccatcgatgtcagtgcctccacgaatagcactatctggtaatctccaagtttgccttgcgtcaacccaaacgtaatctcccattttattgtttattgtcaactgatgaccgatcac

SEQ ID NO: 15038 - DNA, 394 bp, Diabrotica virgifera
ccgccctctcataatttaccgccctaggcaactgcctatattgcctaatggataaagcggccctggtccgcggtcttataaactgtaaaagtcgtagattaaggatgtaccagaaagaactttcaacacgaaaagtttcagatttaaataactatttaccattttaattttattatagtggtgaattctgcatctgagacttttcaatttgtttgtgtgaaaaaaacacttgtttaacacaaatattttgaaaaaaaaaagattatccatcgttatttatggccaggaattccacaatattaaagaaaggaaacaacaaaacaccaaaaacggtccagaaatgctcacaagaagaaaaagaatttgaaattcaccgcctgggccacggcagaca

SEQ ID NO: 15039 - DNA, 394 bp, Diabrotica virgifera
attgggatggtcaatttcactttggttatgaaattctaaagggtactacgtgtctttgaaattgccaaaataatctttgagaaaaccttacaaagagaaccgaagtttattactgcttaatttgtgataaaaccggaagtataattattatactacctattatgtgttactatatctttttatatcagaatatttttttaatacgtgccaacacaaggctagtttgtaataaatcaatgtattttttcttttctcatgaattattttacattcttgtgacgaaaaaataggatcttaaatttatcgggatagttacgtagatttttgtttatattaaattctgaagatctgtctttattaaatttatgcatccatctacgtttttttctacgtc

SEQ ID NO: 15040 - DNA, 394 bp, Diabrotica virgifera
  SmartBlast Evalue=2E-21; Info=9.2 kDa midgut protein n=1 Tax= Phlebotomus papatasi RepID=A8C9Z9_PHLPP
attgacagtgtcccggccaccttgattttctctagtttgcagaaagcaggaatttcagtaaagaaataagattaaaatggcagacaaagtagaaaaggttgccagaccaatgaaattcccttacacattcagtgcaaaaattgcacaattcccaatcaagcactacttgaagaaccaatggatctggaaatactatgctatttctcttgtaatatgtcttccagtcttcaactcgattagtaaactggccaactctcctggaaacgttgctaaatgggccgagattcgcagaagagaagctgctgaacatcatcactaagaaattttttttatagtaattagtctgccaattgttttgttctaatttaatttctattaaatacatgtagataac

SEQ ID NO: 15041 - DNA, 395 bp, Diabrotica virgifera
  SmartBlast Evalue=3E-12; Info="Zinc finger protein, putative n= 1 Tax=Pediculus humanus corporis RepID=E0VPM6_PEDHC"
cgttgaatgtatcactcacttgagtcagcatcttgctgccgatcagtccgtttgtgataagtgtggtagagtttttaagaataagaaggtattattgtcacatatggcagttcataatgatgatcgtccgtacaaatgcacattttgccaccaaagcgtcacgagatcagaaagccttaagagccacgtttgtacgaacccccggttcttatagatgtaagtactgtcagaagttgtttgagactgcggctgctcggactacacatattagttcggttcacaattccgctaagcacattcccggcttttgcaggaaatgcaacgttgccgttatggatttgagtacccataggatatcgaagcaccctacgacgaaacacctgtgcactgtatgt

SEQ ID NO: 15042 - DNA, 391 bp, Diabrotica virgifera
acgaacagctgattcgccgaaatttgggctgtgttcgtagttgtcaattcgtccattcgctgtgcgcactagtttgtttaataattaatatattttattgactacctcaaaatattttatgactacctactaaaattaaataatatttgtcagttagaaatcataacaccaaaagtactgccatgtgtggtgtaaaatgtgtaataaaaatatattaataataaaaatagtgtatgaaatattttatgaagtaagtttttttttgttcggaatcctcaatgttaagttatgtcactcatcattacatagaaaaatatgtttctggttcttctttaatctctacatcattcaaatctatctgttcctgttttattggtacgccatcactaaa

SEQ ID NO: 15043 - DNA, 391 bp, Diabrotica virgifera
  SmartBlast Evalue=2E-45; Info="Protein purity of essence, putative n=1 Tax=Pediculus humanus corporis RepID=E0VLM7_PEDHC"
gttacttttcactgagatatacggagaaaaccgaaggtgttgaagctattcccgaatatgtcgaacgagcattcagtgttcttaaagcacagaacgaaatgttagcacatcacccaaatgcaaacctatatgctcacatgggccaatttgtagatctggatggatattacttggaatcagaaccttgccttgtttgtaacaacccagaagtttcgtttactgtcattaaattgagttcaatcaagattgattcaaagtttacaacaactacacaaatcgtaaagctactgtccagtcacacaattagtaaaatcactataagaatagcagatttaaaacgaacgaagatggttagaacagtcaatatttactataacaatagatctgtaca

SEQ ID NO: 15044 - DNA, 390 bp, Diabrotica virgifera
tgtttcgattggtcagaatctttatgaatgaaataatcaacattattggtataatgtataatcaataaaatatatcatttaatattttaagggtaaaaataacaaatgcatgtactgaataaatataatctattaaaaaaatcatttgctgattgaggcaaagctaattaaggtttttctttattttcgtatttctcttttcagtaactagactttctttgctattttttgttttaatttgtgttcagatgcactttattattattcatatattggtaatctaactcaacctaacatgtaacaaaaaattgtacgaaaaaatggctgataccatattgtgatgaaaagttctattgtgtagcgtttttcttcgtatacagcatatacacg

SEQ ID NO: 15045 - DNA, 393 bp, Diabrotica virgifera
gttatgtaaagccattttcttcttcaaaaccaaaatgttttcaactgttttcaaaatgttattattggttgcagtattaatattggttactatttcaccatccagtgcagataattataataaatgtcctgacaccagttatcaacgatccctggtttaccagaattcattagaggggaatttatttatgtacgcattccaggcagaggtttctttaatgctccaatcaattgtcttctggtgaccgatattaatgaaagttttagtacaccagttatagaagaaggtggatatgaaaatgagtatgtagttttacgtatcgacccagttgaaacaggagaactactgcagtacgatgttcagatttatgtcgaacaataatcgaattgttta

SEQ ID NO: 15046 - DNA, 393 bp, Diabrotica virgifera
agttgaaggctaatgattatcaatattgataaaatacacagaaaatataaaaataacttttatcataaatatactaaatgtacaatatttgttgaccaacaataaacacgaaatatttgtagtattatgatattttcactacatggcttcattactgtcgaaaaagctatcttagctgaaccattttgtctacatgctttttaaaattgtcttttactttgagcagaaatgtaatcctactcttttagaataaaggatgatttatcttacaatgggacgtggacgtcatatcagacgattcttcaaagtgcccttgtaagctcaattgatcttacgatggggacgtgtacgacacggctgtcttacggggcacattgaagaatcatctgatat

SEQ ID NO: 15047 - DNA, 392 bp, Diabrotica virgifera
  SmartBlast Evalue=2E-18; Info=Similar to RIKEN cDNA 2010011I20 n=1 Tax=Rattus norvegicus RepID=B2RYM8_RAT
agaaaggaaaagttaaagaaggctgtaaaagaatatggttcaactgttattgtatttcacattggaatatcattaatgtcattgggcacttcatatttgctagtttcatctggcttagatgtagcttcactttttaaaaccattggactggaagaatggatcaaaaacagtaatatcgcaactaacgccgggacttttgcagttgcttacgctcttcataaagttttgctccagtacgaattacaataactctagcatcagtaccgttgattgtcagatatcttaggaaagtagggtttttaaagaaataaaacttttcttattattagataaggtttaaaatatgaactgacttatttgtgatataatacaaatagtttattccttgagac

SEQ ID NO: 15048 - DNA, 387 bp, Diabrotica virgifera
cagtgtattgaaaagagataggtacaaagaaagactattggggatgttttcacatattttaagtacaatttctgacgttttggtttgtttacttttgtggctgtcagtttgttgaattttttgctgttattttgtcgaatttttgcattttgaagttttttatagtatacaaacagttgttttcacaactaattttatattggagtttgaaattttatgtaagtttatgttattttacgattaattttgacaacgtacaaagctaacctcattgacacagttaaggaatgcttgtgtttaatgttccgccaaagtgaataaaataacaaaagaaatatgttattgaattttttattaaattgtttatttatttattaatctatgata

SEQ ID NO: 15049 - DNA, 393 bp, Diabrotica virgifera
tttacattatttataaacccggtctttgcgattttaaacaaaccaaacattgtattagaatgtgaataaatatatgattgaaatacttttaatacagctttaaaagactataaaatcagtattgtggacaacgatttgggtatccagcacagagttcagcaattcaaatcagcatgttggctcaaaattttcctgaccttcagcaatcaaatgtgacgatgacgatgacatgacactgtctattgacagtttatctgggaacagttgtgatcaaaacctagtcaaacccacaggcgaaactaatgttgaaacagagcttaccaaaaatactgatgatgatgatgacggatctttgtgtcctatttgtttagacaattggactaattcaggaga

SEQ ID NO: 15050 - DNA, 384 bp, Diabrotica virgifera
aaattgagaggcttactataatttctttcaaaatgttttgccgttatttctcgtcgttatgagtgaatgtgttcgtgaaagtgtaataattattttcacgtaagtacaacttaattattttagttcacaagtaaacaacttactgacacattatcaatctggtgtatttaatttccactgtgaactatgtaatttagtcgaagtcctcagcattcaacacatttaaagcttactaaatacataatacctactagttcagttaaaagatgtgttttattttaaagatgtgtaattcgtttaaaattatgcaataggtattttaatacatttaaaaaaattatagtaaacaaataaacaaaaaaaatagtaaatacgttaagtact

SEQ ID NO: 15051 - DNA, 389 bp, Diabrotica virgifera
  SmartBlast Evalue=2E-25; Info=Canalicular multispecific organic anion transporter 1 n=1 Tax=Culex quinquefasciatus RepID=B0XBQ1_ CULQU
ttttagatctattaggtatcaattgtctcgtagtcattgcagaggtcgtaaggatatctcagccattcctcattgcagaacttttaaaagtgtatgagtccaagcagctagatgaagaaagaagtgaaatctacctgtatgcttctttaatcgtcctaacttcctttgtagcagccaacatggggcacaactttaatttacgacttatgcagttaggtatgcaaatgcgtgtggcgtcatgctccctcatatacagaaaagctctaaaattaagcaagtctgctttggctgaaactacaatagggcaaatggtcaacttgctttcaaacgatgtgtcccgatttgacttggctgtttactttttccataacatatacataggcccgata

SEQ ID NO: 15052 - DNA, 390 bp, Diabrotica virgifera
tttgatgatgtggcatcgacgttatggcatttacagacccatcacatgtcctcatcactgaccagtgagtgacggaatgatagaatttaccgttgatcttcgttcgctaccgcatcgcctttgataatggcttacagttgcacacgaaacgtcagaaccaataatttccagatcacgatgtataaacttagataacaatgcacatttacgcagcaatcggcgaacgctagtattgaattgtatttctgatgcactaaatgagtattctttgttaacagattaaacaaaacaaaaaactctcactaaacactaatttgacaactgacaacaccagtttgaaatattcagccgtgtgatggatgaccgaatttacctaaatagttatgggca

SEQ ID NO: 15053 - DNA, 391 bp, Diabrotica virgifera
ctgctggattgatgctgagaacggagagggctttgattggtagcctaacataatcaacaaggaggagctgtttgggtcaagaggagacatcattgtgtgtgaatcaaaaaggtcagtcaataacttatgtgatagattttctttataatcagaagttaatttctttttgcgtaaaagcatatgaattaagattccaacatttcaaaaatttaataggaagtataagtagttttgcgaatacctaaatttgtttgtttagcttgttttattaatggtatcaagaaaaaagcgataaatatttgtttgaattagattaatttatatggtaaaagtttcatttggacagttatgcctacaggatttaattgataaattttcagagcattgcttt

SEQ ID NO: 15054 - DNA, 376 bp, Diabrotica virgifera
ttctaatgctctcagaagatagaaaagggtgtttattttacaaataaacattgtttttcgcttaattaaatcatgtttaaactgtcaaggggcagatgggtggcagctcgaacattaaaattaagcgaaaagcaatgtttatttgtcaaaaaccatttttttctgtcttctgacagcaatagaatgtattttgaattagtaaatttcatgcattcttcttttttgagtcaatttaattaaaaaaaaattttcttgaacgccctgtgtgggtgattgtgttaatgtttatattgctgaatggaggattgaataacctttaaagtaactatcacacgacccctattgtcatttaaaagaagtgatcgatcgtgtcatc

SEQ ID NO: 15055 - DNA, 391 bp, Diabrotica virgifera
  SmartBlast Evalue=4E-37; Info=Protein TRC8-like protein n=1 Tax= Camponotus floridanus RepID=E2A3B8_9HYME
atccggtttgtagagctagtatgtagaatactatcgctgaaacggttccgaaattcttgtcgttttcatcgtcagtcaacaacacccactggaagaattttccgatgaaattgcacatacaagataccacgctggtgattccgagtaccgctgtcaaagtatcgcaacctgtcaccatcaagtacttcatgagtctgaaatacggagagtgtccgtcatctatgccccaatatcctgacagatagaaaatggcggcgttttctagtactcgcagcatccagaaagttctcagtacttctggtacgttcagccttaaccactccgattcgacgagtgcagacatgccaaagttggacacaaaattcttcgcttggaggtagcctgagtatat

SEQ ID NO: 15056 - DNA, 390 bp, Diabrotica virgifera
ttgaaggaacgtgttaattaggagattttattcgttttgctcaggtggttttattccttagtggttgaaataaacataacctcaacactgtttacgtttaatcattgcattaaattaactcacctgggcaaaaacgaatacaaatcccttagttgacacgtttattcaactaaatacctaaatgaaaagtcttattttgtcacacaaaccacgtaaacaataaattaaaaattccttatgagtgtttaacgttgtaggcaaaattgtttggagtcaaatgtaagctcctcccaattttgtgacgtcaagacttaggatgtccattacgggacctctagtagatttctcttgcaacagtggcgccatcgggcgaagagcgaagtacttatt

SEQ ID NO: 15057 - DNA, 391 bp, Diabrotica virgifera
  SmartBlast Evalue=3E-15; Info=RNA-directed DNA polymerase from mobile element jockey n=1 Tax=Camponotus floridanus RepID= E2AVN7_9HYME
gggcgtacctatcactccatttatatttaaatacacttttctatcacggtataacttcattaagttcgcaataaccccttctggaattcctatggcgtataatttatctgtcaatatgtctagattaactacatcatatgctcccttaatgtctaaaaataggcaggatattgagttgttacgagtaaatgctaattgtacatcagtaacaaatgatgttgtaacttcttgagttgaacgtcctcttctgaatgcatattggactgctgataataattgatttttctccagccagtgttctaacctgtttttaataagtcgttcgtacgttttcattatacaagaccccaatgcaataggtctgtaggagtctgcagaatctctaggttta

SEQ ID NO: 15058 - DNA, 385 bp, Diabrotica virgifera
gacagtcttggtcttgcgccagtacacctggtcttggtcttggtattgcgctcccagtcttggtcttggtcttggtcttgcagcaaaagtcttgcaagtctcgcagttgcccattagcctattgtatatcttagaatttagaacaacgtaacaaagaggtacattttaagcttgaatatcacagccatagtaaagacaaccaaattaataaatatctaaacaactgacaccgggtggggtttgaacctacgatctaagcgatccgtgtctatgttccaactaaaaagtttattaggaacttacgtattttttcgagtatttgccattgacactgtgtgatttgaaaagcattcaattcggtgacagatgtgcacaatatgaaggg

SEQ ID NO: 15059 - DNA, 390 bp, Diabrotica virgifera
gtatcaactcagatagcgcaggtaatgacaacttggcttcgaacggaccaatcacagggaagcatccttgtaggccgcgcagtagacatccatgtaaaacacactcattttattttcaaaagcatcgatgtaaacctcctggatggcatcgcgctaaacctccaccgcgacttacctgctctgttctcttccattcactacaatgtgtttgttttacatggatatcgaccgcgacctccatctccaccgcgacctacttgttctgttcttacccctagagagctttcagagtctctagttttttcgtactcaccgaccacgaaacgaatgcgtactcactttgaagtacggacaattttcgacttggtctgaacagtttggttcatctga

SEQ ID NO: 15060 - DNA, 390 bp, Diabrotica virgifera
  SmartBlast Evalue=3E-25; Info=High mobility group protein 20A n= 1 Tax=Camponotus floridanus RepID=E2AUM9_9HYME
atatgcttggaaagtatggcattctgctgttcaaaatctatgtttatttttcttaattgtctcaattccgtatcccttgttttgttgtggtcaagaaattcttcagtaaaaataggtatgtcgaaattgccatagtctacatcttgttgatctttatttaaacctggatggttattgtaagcgagattaggtattttaacaatatcttctttttctttaacttctttaattttcttttcgttctgttgttgcgtaaaaattttgtaggcttcagtttgtttatatgcattatattccttcgtataacgttctctgtcttgttctgctgcatctaagtattgctgtttttattcactggcaaattgctccattcgctagctaacattttag

SEQ ID NO: 15061 - DNA, 389 bp, Diabrotica virgifera
tcaggcaattcttcgactacgtatgtcggtttttcaggagttatttcttcgggtgcctcgagttcttgtacagtcaccgttgtttctggtttcttgccttcctcttgaacagttacaatttctgttttttcttgttttccatctttgtgctttttaatgattctctttttaatgacctttttcttttgtctccttctttggttacacttctgtcacctgtacttcttctggcaattcttccacagtgtatgtgggcttttcgggttcctcaagttcttcgacagtaactgttgtttctggttgtttaccttcttctaatacagtaacaatttcagttttttcaatatgtttaccctttggttttctgataattcttttcttgattgttt

SEQ ID NO: 15062 - DNA, 388 bp, Diabrotica virgifera
gcccagtgaaagaggaacacgacacatggagaatcaggagaaacgacgaaattaatgaattaaataaaggatattgtaagatttgtgaaaagtcaaagactgtcatgactgggacaggaagatacaaaaacaacagaaaatattacaatggaagccgatagaaaaatgaaaaaaggaagaaccagaacgagatggttggatgacgtggaagataacctgaaaactatgaatgtaaggtaatggagaagggcacaagtactccagggtaataagctagaaatagatcatgttcgggacactcaaagatccaggtagctgaccactcccttagtcattgctacacccatgggacgaaaacccacctgtttcccgcctagagctcgcgtcc

SEQ ID NO: 15063 - DNA, 382 bp, Diabrotica virgifera
tcgaggtattttccatatgcatagaaacttatttcaaatactttgtaaacgttaagatgtttattttttgcataaaaacggcgcctcatatgaaaaaaagataagatatatgtatttttgttacaaattatacgagaaattcaaacatgatacttaactcgacatatctcagcggcgtactattttttttttaaattcagaccattaccctttacgcgcgccaatgatgaatataaaattcttctgtcatctgtgaaggaggtcattttgaacatcttttgcaggtctacacctagttaaaatcccattacttattagtatgtaatatttttctgttattgttccagttcagcattactacattggaaagttcttgataatg

SEQ ID NO: 15064 - DNA, 387 bp, Diabrotica virgifera
gaaacctttccagagtagccaacattgatttgacgtcagactatcacggtccattctaacgcgatacagtgttgccattcacaaagttcgaattttcgaagtttcactagaatccgtttccattaagaaattatgtaatgcaataaaatacaaatggaactgtatcgataaactgaataaatcacgatcttaaacgagtgttactggaaaaacaatttttgtaaagtttccagaattttggccaccaatccgacaatgataatgatactggctggattaaaattgtataagatacttcctttttcacagcaacatattaacccttagagcaccaagtggggtcccaaagagaccacagcaagttttctaaataactttttaccacaa

SEQ ID NO: 15065 - DNA, 387 bp, Diabrotica virgifera
tataatgtctcttgtcccgtcaagtttttctaacatttgttgcgtagtttcaaaatatttcccatcaaagagatttgaggttgcagcattatgatgtgaggattgactattagttacagaaacagaactagtaaaactactagcagcagtagcactactagcagccgagttgtctgaatctgaatcctgattttcataggttttttccggagattttgaagaggaggcaccgccaaaaaattttctgaacttcttttttgttgttgtttcaggactttcaggaacatatgtagggtcttttttcatcttcacttggtgtaaaagggtcaggttcaggtaattcaggttcagtagatgtcatgtcaacatctacatttagttctttat

SEQ ID NO: 15066 - DNA, 385 bp, Diabrotica virgifera
tatgaatgtaattacaaaatactaagaatttcactttttgacataaatttaattaaatatatcgtaaattttatacaatatttttaatattaaagtaaacaactgttaagttcactcaaatcaataatcgattactgccatcgaccacttacattcaatctcggttaatttgattaatcgcggcaggtaaagtaaaattcttctttcaatacaataaagtgttactttactgccgcaaatggcgtcaaatgagtacaataatgaatgactttagtgacagttggcgataaaacaatttagtgcacagataagtatatggttaaatgcgttgtccctacatgctgagcgaacgcggtttagttccatggcaacgctcaatacaaac

SEQ ID NO: 15067 - DNA, 389 bp, Diabrotica virgifera
gtttgagtggttacagcgggtcctgataatgacttccatgagagttatactgtgtacattatttttcattttgggagtgaattcctttaaagtagattataatgaacccaacggaataatggatgtaaacagcaattacgtcctaaatgaggactattatgaaactttaaaggaaaattctaataattatgaaaacgaatattatgaactaaacgtcaatgaagttttggatacaagagaaaaaaaaagtccagcagtttgtaccgttaaaaaagtattgaggactcaccctcaagatggatatgaatatcacccaaagcattaccacgagtacgaatgtgtaccagttcctaagggaataattgacgtcgatttttctgatcaagata

SEQ ID NO: 15068 - DNA, 380 bp, Diabrotica virgifera
ccgtggtggtcaatcgattttaggtttgcggattgcgaatgaaaggtgcagtacacttctataggcaaagagaattcaacttgctgtctgctttattttcggtcctgtaacattttgaaaaaatgatttttatgaagaaattcacagtgtggttttacttgtatcgtggattttttctgggtgaaatatgaaggtcctaagtgtagcataaatggttgaagggcgtaaatgcgaatgcttgtttttgtatgtttttttttcgcaattattgctattttgcagcaaaggtgactgttttttggatttttaaccaattctatattataggagatttagttgcgcagtctttttattttaagtacagcttctttcggaaatga

SEQ ID NO: 15069 - DNA, 389 bp, Diabrotica virgifera
acgaagaaaattttcttttattagaaccattatgttataaagatataatttactgcttttcttctgcgtatatattattatttacaatattacatggacaataacttaacaatttgccaatttttaaaataaatttaaacaaaactctttgtatacgggttaaaaataaaactaacaagtatatatgcctttttttattttaaatcatatgcttagaacagaatactttttaatatactaagggcatattttgccccaagagaggataatgattctcttgtccaaccaagttttgggtccattcttggttccaccatccgggttgttccatggcttcataatgttgtgggtattgttgtccgtatctctggttccagtattgggacaat

SEQ ID NO: 15070 - DNA, 387 bp, Diabrotica virgifera
atttcgcgcagcagccgatagagagaggtttcaggaacttgtaaacatctgccaacgtctgaatacggacacggcatatgaagaagatatgtcaaaaactatgaacgttgtttcaaaaaacctaaaaaaaaaacttcgttcgatgcaaacaattaattttagaaaaaaaaaacaaaaaaaactggtcaaaaaaattttttgacccgtttttggacctggcaacatgcaaatttgttaaagggggtcctttttgagtgggagtgtgcaaggatccgaatcggaatatttttcctagcggatgcgtagtggctctctggactaaagtgtaactacaaattgaagtactttgcaaattcacccatttttattaatttcatgaagtttcaa

SEQ ID NO: 15071 - DNA, 387 bp, Diabrotica virgifera
aaaactggtttatttaattcaagttgtaatatctgggttatagaacagcaacttaaatcatctgaagtagagttgtgcctcgataaattaagtgagaaccttgagcagatttctccagatgagcaggtctctccaaaaaatatttcaaatgaaggagaggtacatagagatgatgcaaacactgaagggtcatctgttagtaaattgatttatacaaagacaacagcaaagaacaatttagttagttctaccagtgcaccacgaagtataaaggaaactacagataaaaactggcttaaaggagtaataattttgacagtggttacattattatttttggtactatttttgttagtattatgcactttaactatttgtttgggatat

SEQ ID NO: 15072 - DNA, 386 bp, Diabrotica virgifera
tttagataataagtaatacaattaaaaactaagtaaacaatgcaattaatagacgaaacttcagtagaactttatatagattaagaatttttaacctagcaatcgaaaatgttcattgtgagcctttttgtacaactactataaacattcattataatacatatgttgtaatgtcagtaaaacctgtccccgcagtggggatttcttgcaaaatataagcatgtcataaatattaaatgtatcttcagcattattgatttcttagataactgaaaatgtgttttatttatttagggccggttgttctaacgctaatcaagaagttaattataatcaagtccccttaacaaccatcaaataacaaatccgttgttcgtacgccgatc

SEQ ID NO: 15073 - DNA, 386 bp, Diabrotica virgifera
tcaatgttcctctagtaggtaagttatcgttccatcgttttcgaggttttttactactctatttttttgttgtcattcggctcatgtggtcgttccattatactcttatttttttaacccgttattaatgttgtccaccttgcatctctgtcgtatatctgcacttctagctctatatcccatagtatcttaccatcgatatttcgaagtgttttcatctccgctgtttgtagcattcttttttgctctctgtgtcaggtcgtgtttctgccgcgtatgtcattattggtctgatgactgtcttgtaaattttgcctttcatttcttttccgtattattttttatttctccatattgtgtcattcaggcaacctacggctctgttt

SEQ ID NO: 15074 - DNA, 387 bp, Diabrotica virgifera
gttatcgagaaagtacgcaagtattaaaagtgaagtgtgattacaattatttctagtgaaaatggattgttgtaagaaaggagaatcccgcaccattgtcaaacaatgcaaactgacaaagaaagatggtactgtagtagactgcgagtgtacctgcacatgcaaatgtgaaaatgactgcaaaggttcagcctgtcctggaaaaaatggatgcaattgtgactgtactgaagaaacagccaagttaggacctgatggcaaataccgatgcgtttgcgaatgtacatgttaattattttaatgttaattttgaattcatatctactttgtagtttgtagtaaggcgttttataaagactgtattttatttataaaaaaaaaaaaaaa

SEQ ID NO: 15075 - DNA, 388 bp, Diabrotica virgifera
  SmartBlast Evalue=4E-43; Info=CG8067 n=8 Tax=Sophophora RepID= Q7K1S1_DROME
aaaagcctttaaaaggatcctgctgagccttaaagaggatggtgtctttttagcttcagtgtttggaggtgacacgttatacgagttacgatcttcccttcaattagcagaactagaaagaagaggcggaatatccccacacatttctccgtttactgaagtaagagatataggaagcttattgacaagagctggctttacaatgttaacaatagatacagatgaaatcattgtaagatatccatccatgtttgaactgatgattgatttaaaagggatggcagaaagtaatgctgcccttaatagatcgttgcatttgcatagagatacacaatttgcagcggcagctctataccaacagctttacggagcacctgatcctgaatct

SEQ ID NO: 15076 - DNA, 378 bp, Diabrotica virgifera
  SmartBlast Evalue=1E-18; Info=Putative uncharacterized transposon-derived protein F52C9.6 (Fragment) n=1 Tax= Harpegnathos saltator RepID=E2BUQ3_9HYME
tcttttcttttggaatcataaccctggatgggtctttgcctgtctggctatgtccttccattcagatctctcttgtgcccttctcctccattgtcttatattcatggttttcaggtcgtcttccacgtcatccaaccatctcgtcctggccttccttttttcgccttcctaccggcttcactgtaatatcttctttgtcgttttcgtatcttcttgtcgctgaacatgtcccagccatgacagtctttgacttttcacaaatcttacaatatcatacatttcattcagttcattaacctcgtcgtttctcctgattctccatgtgcggttttctcttgcaccgggccatatacttttctcagtatctttctctcgaat

SEQ ID NO: 15077 - DNA, 388 bp, Diabrotica virgifera
aagtaattttgaaaatgaagtttttgattctctgtattgttttgagcgtctttgtgactttggtatattcacagacagaactgaattgtcctaaaaactcacatcaaggatgtgtcccatgctgtcctgatccaacctgtagtaacaggaaaccgggatgtcctgacataatatgcacagaggaatgcaaacccaaatgcagatgtgatgatggttatatctacaatgatattggtattgttaatggttgcattaaacctaaaaattgtcctaaaagttaattgcgacaaactgatttcagttatttttgtgtgaaacaagttttattgtgtgtttgttaaaaagtttataaaaatatgttataaaataaatcatgttgctgacagaa

SEQ ID NO: 15078 - DNA, 381 bp, Diabrotica virgifera
  SmartBlast Evalue=2E-11; Info=Endonuclease-reverse transcriptase n=1 Tax=Bombyx mori RepID=D7F160_BOMMO
agcctggctatatgttgtcctgcgtctttgacttttgttttatttctgacccagttgttttgctttttgtctgttttagttccaacattgccctctccatggatctttgggtcttcatatatttatgtttgccttggtcaaggtccatgtttggcatgcgtatatgagaattgggagtatgcactggtcaaacactcttgtttttaagtattgttgtatttttttattctttaggacccattttaatttcccaaatcctgcccaggctaatctgacccttcttttacctccctatatgtcacacatatattttgtcataaaacggtaattattttagttccaaagtgtaacaattcgagttgttaccctgttttctcgtaa

SEQ ID NO: 15079 - DNA, 387 bp, Diabrotica virgifera
  SmartBlast Evalue=1E-21; Info=Protein FAM38B (Fragment) n=1 Tax= Harpegnathos saltator RepID=E2C9W9_9HYME
ggggtctgtaagtttcatgaagtcgttgtggaagtaatgtaactgtataacggttacaattacgaagaatgtgggagtcaccagccttacgaataattgtttcgtcttatactgttctaatcctatatcgtgttgctgctcttcttgtatgtgaagatatgatgcccaataagaaggaaaccgcttgaactggtaagtgtatatcaatattaatatgatcatagaatatataattaccgtcaaccaaaaaccaaacattacttttctccaagctctgaatgaaaattggaacgagagtataaaaaataagaacagagtcatgtataatattctgaaaacggtcattctagaaccggttatagctactgcaaacaaagttattgctac

SEQ ID NO: 15080 - DNA, 379 bp, Diabrotica virgifera
gttgtttcatgcgggattgccccttaaagtttgtcgcacttatttggaaacaccgtgtattgaggaagaacatgcgtggttgttaaagtgcctaactttttattgtccaacataaacgaatgaatcaaagaactaatgttgagaaaatctgaggctatagttggattttaatttgagtattttataaatgctagaatattccaccgggtgatgcgaactttgagaaaaaaacacagtttgattggtacacccggtatacaatgaaaacttgcctgtttggcaacagtgttattgcagtgatgtggttgaagaatcgggctatagaatgtttagggaatcgcttgaatcggccaacaggtttgggaagtgtgggacatca

SEQ ID NO: 15081 - DNA, 387 bp, Diabrotica virgifera
caacataagctacttcatcggcatggcatgttccaggtaaatgacttaaaccttttgctatcttcaacgcattgagacctccttcaaaaacaaatttataaaaataaactggcacatcggatgttttaacatggttttccacagcagctactatcccaagaaaatacaaagaagttgagaagggcaaatatttgtcattatgtcttgttggtgctgagtagtaatcttgcaatttctttttaacttcattatattttgcactaccctcttgtagctgcaaatcccatggtattgcattctctattgacatggtaggtggcttaaatcgggggaatattagttcgttatattccacaaacattccttcagtcttattagtaccaaaaa

SEQ ID NO: 15082 - DNA, 384 bp, Diabrotica virgifera
agacagaagacatggagtgaaaacaaaaaattgaattgtttatttgaaaataaaataaattttgattctagtatgtcaaatagtaataaaagatcaacgcttatgttagatttatctaacgaatactatgaagactcgtacgatgatctttttcaagaaagatttagctcacagccccaaaggaaagatcgtttggaagttacaacagttctccaacaagttctatgtcaccactaggaaagaaatatgtgtcgccattactcagagacgatataagttacaaacgtcgttcaaatgatgcttctgatgaagtaccaaataaaaagatagcttcttgaaccaatggtgataggaaaagtaaaggaaccttctagactcaatttc

SEQ ID NO: 15083 - DNA, 386 bp, Diabrotica virgifera
gatcttgtaacggtaggaaatacaacatgtcatacaccaaggttctctttgctttgacgctgtgcgtactgttgtacacaggtgcagatgctgttagatgcgaatgttcagacgctgtgtgttcctgcctggataagtgtccaaggaactatggagtacctgcatatgacatcgactgcccatcagcctctcagacttgctgtattaagaatcccgaaaaccctgcgtctggagaactagaagatattatgtcactatacagattttacgaaagacaagaagagcttgcacaagaaattgcaaacagaaacttttaaatatatgtattattagatggttttaaaacagtcattaattaagccagtttattaaattgattatttctt

SEQ ID NO: 15084 - DNA, 387 bp, Diabrotica virgifera
  SmartBlast Evalue=2E-13; Info=Protease inhibitor-like protein n= 1 Tax=Antheraea mylitta RepID=Q0Q007_ANTMY
agttgttggtgactacgaaaacaaaatgaaattcgcatctttgctttgtattgtgatcttcaccgtccttgtgatcatcagcgcggtgttcgctgttccgtccaagggatcaaccaaggcatctctacagaagaaaccatgtctaaaagactgtagtgctgttgagtacaaaccagtttgcgggggagacggaactggaaagggagacaaaagcttcggcagcgaatgtgtcttgggtaacttcaactgcgaacattcaaccactctgaaagtggtcaaagctggggaatgtccaggaggtggcagcatccgtcttcaataaataataagacacattctgtattataatgaattgatttcaactatttgaacaataaaaagctaata

SEQ ID NO: 15085 - DNA, 388 bp, Diabrotica virgifera
  SmartBlast Evalue=1E-19; Info=Fatty-acid amide hydrolase 2 n=1 Tax=Camponotus floridanus RepID=E2AI08_9HYME
aggaatcatagctattcgagttttattttggatggttataaaatctgtaaacgttttgtatattccggtcctgataaaaagaatattcaggaaatcaagagcttgtcctccagtcaaaaatgaaatcctcctcctctctgcttcagaactagctgagagaattagacaacaaaaggtaacatgtgaaagcgttattaaggcttacatagcgcgtatacagcaagtgaatccattcatcaatgcagttatagaagatagataccaggcagcaatcgatgaagccaaaaggatagatcagtatctctcgagtagttctagaaatctggatgaaataaaagaaaaacaaccactacttggtgttcctatatcgataaaaggtagtatcgag

SEQ ID NO: 15086 - DNA, 387 bp, Diabrotica virgifera
tggccaagatttactcttgtttcaacatcagcacaaatcgcattgccggtacgtgaattatgctatgaagagagtatttagtaaaattctggttagacgacgaactaacacacttcttgctggtcatattcatagtttcaccttccttacaacattttcgcacacacagaacaatatcacagatacatcccttaaccgaaggtccgatggtaaagtaatgttgaggagtgtaggttattccatccttgattatattgttaccgtcccgagtaccgtctgatatatccacgtagtttttacattggtcactaaaaacagtactagtttgtagcaataaagtcactaatatcataaccgaatacattttcgacgcagaaggaacccgac

SEQ ID NO: 15087 - DNA, 385 bp, Diabrotica virgifera
  SmartBlast Evalue=7E-20; Info=Endonuclease-reverse transcriptase n=1 Tax=Bombyx mori RepID=D5LB38_BOMMO
gctttatagaagagacttgaaaataccttggacaacccacaccaccaagaatatgttctgagaagaataggtacagatagggaactggtaaaaatcattaaagtcagaaaagttagctacctgggacacataatgagaaacgaaaagtaccgcctcacgtaactgatcatccagggtaagattgaaggaaaacggggtcccggtaggcgccagatttcatggcttagaaatatcagagactggaccggccttgattcaacatctttgtttagagccgcattggacagagacagatttgccagtgtagtcgctaacctccactaaaggagaaagcaccacaagaagaagaactttcgcattgtcatggtgatgacatgtgacacgt

SEQ ID NO: 15088 - DNA, 387 bp, Diabrotica virgifera
tggttgtctcgacaacgcttggaacatactgataggcccaaatatcttggagggatactagaccggtcacttacgtataaattccactgtcagagcataagacgaaaggtttttacgataaacaaccttctccggaaacttgtagggagcaagtggggtgcaaacccccaggtcttaaagtaaacagccgatgccttatgtttctcaacaggttaatatgcttgtcccgtctggggtagatctagacacgcccaacaagtcaccacggtgttaaatgaaacatgtagaataattaccggttgtaataattacggtaataattacatcaccagacgaccgtagatgcacctcacaatatgtggagaagttcaggcaaactttacgatg

SEQ ID NO: 15089 - DNA, 387 bp, Diabrotica virgifera
acaggtctagtactcgtatttttgctttttcgcaaaattttttatacaaagacaaaattgatagacgtgccttatgtatattttctttggtctaagtacaatcacgaagtaattaaatatatgtaaaaaggcttttacgggacatctgggtaatactacaagagtcaaggagcagtatatgtggcttgactgtaaacataaatgtttactatacttctccaaagttattggtaattcccgcactccctgtcattggctgacgtgaaattcatctcttcttctaatatcgtcgatttaactcatctctcaatctaaccttggttagaaacctttctgtgcaaacaacagccatggtaggatgactgttaccgtaatgcagaacataac

SEQ ID NO: 15090 - DNA, 385 bp, Diabrotica virgifera
gtaagtttctcttaaaaagccacaacaaaaacatgaagtagttggttgaaatacaagttaaaagtcactttcgttcaaataattttaattaattcgaacttgaaagaagctactttttgttattattgttctgaagctattttcctgtggcaccttcatacaacttcatattttcacagggaataaaccacaaatttactttaaaataaatttattaataaaatacatagtaagaagtaaaataataaacttattttaagtaaaattgtggcgtattcccactagaaatagtaaaaaggattccttctagaatgtttgttttttttacgtgaaaaatattgtcgtaatttagtagtaggtacttcacttttttagaaaatctagt

SEQ ID NO: 15091 - DNA, 384 bp, Diabrotica virgifera
gaactacaaaatgaaaatcaaaaaaactactagtgttgccattaataaaagtaaaattagtactgaatagcaattttgagatttttggaatatatgattcaggttcaaatgtctcattaataaattcaaaattgttgaaaataaataatgaaagactaattaatcctagagtactaatttaaaaactattaatggccttaaaaaaacaaatggaatggtcacattaagtataaaaatttttgacgtagaaaaagaaactgaagtctttgtgattgacaagggtaattttgattatgatttctaattggtttagactgtataaaaaatttttatttatgtcaagatgaaaacctgaaaataagtcaaaaaccacctatacatata

SEQ ID NO: 15092 - DNA, 385 bp, Diabrotica virgifera
ttattatataaataaatttaatactaaaaaacttattaataattttataaaactctatagggtcttctcgtcttttaaaaaatttaagctttttaacttaaaaataaaattctttataaattaaataaagacagtttttttttctatccaacccttccattccagctttcaataaaaaaactaaatgattatgctaccttagcacggtcaaaataaccgcggccattcaaattaatcagtgggcaggcgagactttatatttaatacaaaaagacatgtttttaataaacaggtgaaaaaatagttgccgaattcctttattaaacctatatattttacttaaatatacaatttttaattactaatattatcatcattactaaat

SEQ ID NO: 15093 - DNA, 386 bp, Diabrotica virgifera
ggcagtgggttgaagcataaaatgaaaaaaatcgattgctgtgcagtgctaaaattcttttacccagaggccaaaaccatttcgggcttgtaaatatttttggcatggcattttccatcaaggatccatctagatttggctccctcgaacctccagcaattctcaaaactttccttcctcgtgtttttgtccaattaacacgtttgagaacttccacaggaacactaaaccccgctaaatgaaatgtatttaaaggagaaattatataaactgtcgatttcatcatcaggccaagaacttttcagaccaccaacaagtactacgtcacctgacatataaatagacgaaaaaactcttaagcaaccatactttatacatataacaga

SEQ ID NO: 15094 - DNA, 385 bp, Diabrotica virgifera
  SmartBlast Evalue=8E-25; Info=Protein archease-like n=1 Tax= Camponotus floridanus RepID=E2AH10_9HYME
gaatcaaattaaatattaaattgtggactgtggttataattaaaaactagtggtccaccggtccaccagtgtttttattgttttggagttctaaataaaagtacaaacatgggagacagttttacacctgaagaattagaattaccatcatgcaaatatgaatatttggatcacacagccgatgtacagttacatgcttggggtgacagtttaatagaagcttatgaacaatgtgccatagcaatgtttggatacatgacagaactcgatagtgttgaaatactacaatctgcagaaatagaagccacaggacatgatttagaaagtttattgttccactttttagtatgaactattatttttattcagttgcgaaccattcctt

SEQ ID NO: 15095 - DNA, 377 bp, Diabrotica virgifera
atatagagggcggaagtgagtgtaactgccaattttttaaataacacttgcacaagatattttacgtctagtcctgtcgccaggggggtacaacggcctcctttattcagatggacttgccctggtttttttgtgtattttgacccgtggaacacgggttttttgggtagcagttgatccggatgtcgatgggattgttataaacggagaacttgaggaattgcataacggcgatttctcgcaaaacaaaacattttttgtattttttgggtcgttctaaacaaaagatgttcttgcaagttttttcgtgggctgcagttttcgagataagcgctgttgaactttcaaagaatcgaaaaattgcaatctttgaaccg

SEQ ID NO: 15096 - DNA, 381 bp, Diabrotica virgifera
gggatgggtacgaactttcagcttcaatgctatttaaatgggattaatttttttcgaatcctgagaaaactcataagtatttttgaaaaatttaaacgcagaatgaaagattacattattaccaagggccgaaggtccctgaaaacttctataatgtttattttaataagttacaggggtgaaaaattaagagaaaattcagtgtgatttttaatttcaaatatctcattcaaaagaaactttttattcattctaacctaggtctaatgtggtcgtggatagactaatttcagggctttcttatggaggttttggtttaaaattttattaattgtttgttcgttatagccattgtttactgctatttgtttaatgatgttc

SEQ ID NO: 15097 - DNA, 385 bp, Diabrotica virgifera
  SmartBlast Evalue=1E-51; Info=Zinc finger SWIM domain- containing protein KIAA0913 (Fragment) n=2 Tax=Formicidae RepID= E2BDW9_9HYME
tttcaaatgccacgtggtgaactgattgtgtagcatgtctctttcagttggagctagaccagggttcaatgctgccaatctccaaagaacaactacttcatcacacaacgaagaacaggcatgttgagaagcatgtgtgttactattaacgttgttgtgttttcctcccccggttcctccataaccagaattaccactaagcagtgctaccttggtgttaaaccaccaaataaggatttgctcacacgcaagacattcttcagtgataatctccagaagtggaatagcgttccggtcatttcgtttgaacatctcccgaacaatactaaggaggttccacattccttcgggttctcgccctcgcagtggccgtagaagagacgtc

SEQ ID NO: 15098 - DNA, 384 bp, Diabrotica virgifera
gaatcatatccgtaacttgtaaatgagaacattttcctttttccgaagtaagttagatggtgtcatcaatttttaaaatgaaaacatagacagtttcttagtaacgatgttaaaataagatatgcaaattagtaaagtgtatttgaatcaaatgttgtgaaacctttaagacttcttactagtccagatgctagtttaacaagccccggataggtcggaagaatgcgcattcgaaacaaaatgtattacaatttaattcatgtcaatctgttacagtagaaataattatttaatcgcaactgttacggaacaaatgttttactttaaccaaaaaatgacaaaaaggagaatggaaattcacagctccggctaagaaacattaaa

SEQ ID NO: 15099 - DNA, 384 bp, Diabrotica virgifera
atacaacagaagatgattcaaatacaacaccaaatgatttaaatacaacggcagacatttccaatataactgcagatgattccaataacactgaagatgattccaataccacagccgacgatactaacacaacagacgtttccaataacactgaagattataatattacaacagcacacgattccaatacaacagcagatgattctaatacaactgaaaatgattccaataccacatcagacgatattaatacaacatcagatcattttaatacaacagacattttcaatacaaccgaagatgatcccaatacaacagcagacgatacttatacaacatcagatgattccaatacaacagcagacgattataaaacaacagcag

SEQ ID NO: 15100 - DNA, 384 bp, Diabrotica virgifera
gataagcaggaagaagtttactacaggcggtggagtttattacatcactggcctcgataataacacagatgttggtcatttcatatacaggcagttatggtatttagttatagccattattgcgctaaaaacaggtaaagaaacatattcttcgattttatttttcgtcgttttaaccaaatatgcctcgttatagagggttatagttcaataggaatttcatgggacacctaatgtacctctttataagcgaaacctcgtaatatccgtgttcgttatagagagagttcactgtattatgttatgcagacgacgcctcattaatcgcagagacagaagacgatctccaaagattaacacacatcttcaaatacaaacagccaa

SEQ ID NO: 15101 - DNA, 385 bp, Diabrotica virgifera
aaaattctgaacatttaaaaaataaaattaaaatttagaaaattaattaaaatgatggtttaacatcggaagtgtctgaatcaaaaccagtaaagcacccaagacttaattctgccccttcattttctcttcttttccgtttcttgttcaggttaaatccattccaaattgtcatgtttttggtatgaagaactgtttaaatatttaaacatgagtacaagtttaaccgccttttcggttcctaaattatttcgtaatttggaatgcacaagtccaaagcttgaaaagcactttcaatgcctgccattgaggctactgctgtaagtaattggttaattcgttcgataaatatatttttatcaggccaagcagattcagtgattgg

SEQ ID NO: 15102 - DNA, 379 bp, Diabrotica virgifera
aatactcgcttgttcaatgaataggttaacgattggattttgattttagtcaccagatagggactctatgttttatctattatagtaatctttctagctttccatattctatgtatctgagatgtcattagattattattgagatttagcttagtttggcttaatattgaactggtatggaactgttaacaccttgtatgtgattatgcttatatatgtcatcacttgtagattagtgtatctacataataggtttagattaggattatctcgttttgtatttgattttgtagtttctactggaaagttatttcagtgcttagcatgattccttggtacattagcttatttttgtctaaagaagtcattgtgatatttg

SEQ ID NO: 15103 - DNA, 385 bp, Diabrotica virgifera
  SmartBlast Evalue=9E-17; Info=Importin 11 (RanBP11) n=4 Tax= Xenopus RepID=Q28C38_XENTR
cggctcctagcgttggtgacgctcttaagaacgtctctaccaacctcatcaacatcacaattccctcattctttaaatcccccatcaaaccatcacaaacttgcataagttgtacaccctgtgtgcgcatgaccaactctggagctagtaacaaatgcaccaaagaaattaacaaacaatgtcttaaattctctgtagaatattccagtagagatcccatacagttaaagagctgtagaagtggttctgacatagacgtggagtactctaaaaccgtcatccaaagattcaagcagtcttctaacaaatatacaatggcactctgcgacacatcagtccccaactgaattattggtagcaagaatgggttcagttctggtttaac

SEQ ID NO: 15104 - DNA, 383 bp, Diabrotica virgifera
  SmartBlast Evalue=1E-24; Info="Translational initiation factor IF2, putative (Fragment) n=1 Tax=Ixodes scapularis RepID=B7QNR1_ IXOSC"
gcctccaaccttctatttctacaggatatcctggtggtacttcttgcaacgatttacctttatcatctttaagagatcgaactttcgccatcgaagtacctgctaccaatatatcacctttttttaaggtacctctttgaacaataacggtacacaattttcccctgtgctgatgaagtttactttctacaacaacagcttcaacaggtcctgtaggatctgctccgatttctagtaattctgcctgcagaactaacgcttctgttagttgttctaagtttgttttttaaagctgatatagggattgattgaacatcacctcctagttgttctacttggatacctgcttccaccagtcattttttgtgttcgagctatatcag

SEQ ID NO: 15105 - DNA, 384 bp, Diabrotica virgifera
cacctatcagcaactttgtttgaaagtaattccatcatttgatttaccaactttggtaaatgtatacagaataaacgagaaaaatttcggaacattgcattgagttgaactgcatttaaaatagtgggccaatataaaacttcgacacacagatatccataccaggttaatacacattgtataaaatatcgttcaactatctgtctccttttcagagggccacagcccataacgccgcccaaagtcaatgttgccaagcggcaatatttttttttacaaactgactatttattgctttaaaaccagttgagatatgcaaatcaaatttggtgggttttaagacgtagttattgcacatttttttgacatacaattaagaatttt

SEQ ID NO: 15106 - DNA, 375 bp, Diabrotica virgifera
tattagacctggatctcgagtcaccaaaaaatagttgattaatagcaagctgaaaatttgttaatagctcaacggtgtctagtcggacaaactttgatgtatggaaatactggaacagggcaagttttaattggggaaagttgattttaatgatagaacttgtcattctgataagtttattattgtgaaaattagcacgtttgtttttaagtttattcaatagcaaactgtatatcatgaaaaaatcgtagaatatgtcaaatgacaggaattatgttggtgataaattgcagtctgatttttgtatgagagtataatgaaagggtaacaaaccaattggaagttctgtccgacaatatacatgggacgttttcg

SEQ ID NO: 15107 - DNA, 382 bp, Diabrotica virgifera
  SmartBlast Evalue=1E-14; Info=General transcription factor 3C polypeptide 1 n=1 Tax=Harpegnathos saltator RepID=E2BRF1_9HYME
agatttatcccaccattccttttatttcggttcgcccgcggatattgaagagtattggcaacaattaagtacaataagtatgaacacgaagttgggaactagagaagccggaaaacttgtgacacttagttatattaacacaaagcctcaacttgttgaatgtatcaaatccagatcacccatggaggctctagactatgataatggaattatacctggcgaccagaagggtgcagctggtttggattccgccatgtggacacatttagtaaaaaattggtattataccaaaggaaactccgggaattctttatatagtgactttaaagatgattcattaaaaaaggtaccatcacagttgatatcttttttaatgaatcat

SEQ ID NO: 15108 - DNA, 383 bp, Diabrotica virgifera
  SmartBlast Evalue=3E-30; Info=Acireductone dioxygenase n=1 Tax= Aedes aegypti RepID=Q0IFH8_AEDAE
gctctgtgtaaaatatcttcaacttttctgcatagttttccaaacacttctcggaacatgttatctcatcttcatagttgtagcctctttcttgtttaattttatccagtactccatctgtgtttaacgttttcatattgagtttgaagtactccactcccgtgctattcagcaattctggtaaatctataaattctggaggatctttttggtgctccagacgttgatctttgtcatcattatccatataccaagcacgaaccattttaaaaagtctaagtactctttacctttgtaaaactttgtggtacagtagaatattatttaaaattactgattataagtttctgcattaaacaattatcactgttgcgaaatcattt

SEQ ID NO: 15109 - DNA, 384 bp, Diabrotica virgifera
  SmartBlast Evalue=2E-15; Info=KRAB-zinc finger protein n=3 Tax= Mus musculus RepID=Q6R5P3_MOUSE
ccagggtgtacatagtaacattataaagatatatatgtaagagaatcttgggaattgtttaaattaatattgactatgtaatgtttaatgagacataattgcgtataattgaaaatttataatttggttttattttagattctccacaagaggcgcacacattggagatcatgaaaacaatacatatacatccaaatcacactgaagaaaaaccttataagggcgaaatttgtcataaacagtatacttgtaaagatcgtttaagtgcacatgtaaaagttcatactggagaaaaacctcataagtgtggaatttgttttaagcagtttaaccaatctagtaatttgaaaacgcattcggcaatgcacacgagagaaaaacttt

SEQ ID NO: 15110 - DNA, 383 bp, Diabrotica virgifera
  SmartBlast Evalue=2E-44; Info=N-terminal asparagine amidohydrolase n=3 Tax=Culicidae RepID=B0XAF5_CULQU
tgttgtaaaaaagttcttccgaataacccagcctatctgaaaatcctccaactaactgtaattcaattctaccacctgaataacccacagccagttcttgaattttttcaaccatggctgatgcagcctcatgtgttcctaatccatcaaagtgtgctagagcgactgcaccagatccggaatgtctaagaataacaagtatgcaggtggtagcatcatcggaccctagaattgttacattcttgtcatgctgattgactgcagcaaactccctttgcaagacatacaacaaacccgcaggcccaacaatcttacttggaattgataacagttgagtggccgtttctttatatattgggtgagcattatataatgtttgtgta

SEQ ID NO: 15111 - DNA, 381 bp, Diabrotica virgifera
catcagaattaccttacatgtctagtacagacatgtgaagcatgaacaataacgatagaaaatttaaaaacaaaaaaatatcgaataaaaaaaaatgacaagtattcgaaaccaagagcaataatgatagaacatgtaaaaataatcttaatgatagaaaaatagaagcatggacaataacgatagaaaatttaaaatgatagaagatatcgaataaaaaatgacaagtattcgaagccaagagcaataatgatagaagatgtaaatatcttaatgatagaacaaaatatttcgggcaaaactgtatcagcagaaaccctcgttcgctatgcaaatttctaaaccacgaaaagaatgataaaaacataagacagaaagcac

SEQ ID NO: 15112 - DNA, 383 bp, Diabrotica virgifera
tccgtatccatctccaccttttccccctttttttcgcttaggttagtaaatatctctattagttttatatttaactcttcgagtttcctgtttattttttgttgtttggtttcgttaggaaacttaatactctcttccagtctctccctcttcagatcatttattctctctagactgtcccctttccttttcttcttattcatggtttcatcatcaagcaagaaagaggctaacaccctctcctgaatattttgccatcctttttctatttttccacttcctcttgtgatctttcctcccctatctcatcgtcatcattttcactgctttccagcatttcatcccctactagtgtcgactgttttggggcagtcgacctgttc

SEQ ID NO: 15113 - DNA, 384 bp, Diabrotica virgifera
caatctcataacaagcaatgatccaatccacaacatatgcccaaattttgtatctgtgcttgattaagactcttttatgtgcaatttacgttgatttgggtactcttttgctaatttatttattaataacgttcaaaatattaagatttcaattattcttgaaaatacaatattcaacaatatttcttaatgattgttggcataaaatttaaaatatgttgtggaatgacctgaattgtggcaaatatagactaattcctctatgtattttccattattgtgtccttagtatttttctacttacttttgaaccgaaaaaaataatacatacgtacacatctaactttatgatattattgattgtttaacataacaaaagacatt

SEQ ID NO: 15114 - DNA, 383 bp, Diabrotica virgifera
cctgtcaaaatgttcaatgtgttttattaaatgtattcatttttttttcgaatcatgagaaatataataagaatttttcacagaaatacgccaaagttaggcaacacacattaccattatgtttatcggttgcgttccgtcacagtgaagttattataaatattgacaatttgaactgtcaaaatttctattttatcatttcttgtttaaaaaaaataataaaattgataagatagcctcagttgaggagaaagtaataataataaagatgttttattcagtcaatagtgtacgaacaataaggtaaataataaagtggtcctaacttttacacacatgcctactgtggcaaatgtaggtatttttcaaaatgttggaatgtg

SEQ ID NO: 15115 - DNA, 382 bp, Diabrotica virgifera
aaagcatcatagtataaaccatatgcaatatgatatttgaagcagtttttggaaaactgtacagaattaatctgtttgcgataaaaataacacatcttacgtcttagtgtcaaaacaaacaaaaaacatgcttaatgcaaggtattaattataaagaaatacgtaattaaaagatgcttttgactagctttaattacattacagaccctgctcaaattattaaattcgccctagaaattaaggtttttttaatttcaagcacctggaaagtatcttcacattgatacagagctgttgaatgggttgcataacaattagtgaatactcatgcaacataatttagataaaatggtggaactttttaattgaattgttaatagag

SEQ ID NO: 15116 - DNA, 379 bp, Diabrotica virgifera
gtacaagcagcaaacccgaaattaactttacagagggtgatgaggaagtaccttcggataaaactgatatagcagattgtaccagtagccaaaaccctgaaactaactatacagaggaagatgctagctttgatgagcaggatggtcaatatgatcaacctaatggatcatatgatgatcctgatatattggacttgaaagcttctctccctggaggacttaaattagaagaaagcgcagatacaacagaagcaactgaagtaaatgagcaaacaaagaagcatttggatgaaatcgttaaggaaaatatagtggttgaatcgggagaaaataagaaacgaaccgtcagattcaatttagaagaaaacgaaagtgaatt

SEQ ID NO: 15117 - DNA, 377 bp, Diabrotica virgifera
atcaatctgtctaactatacccttacaagtaacaaaattaaagggaatataaattttataacccttgtctaacaaagttttattatttagaaattgattagctgattcaaaattaataaagtcaattgcaattctattcaggcctttactatgtatttttcgaatatcttttaattttaaattgaaaatatctctagcaattttaatcccattaaacgaacctactttcgtatcaggtatgtttgttgattctagatacacaaaaaagggcccattatctttttcggagtagaggttgataatttttgttcctgatgggttttatcgttctgagataggctatgggagttagaaatatcgttattactatttgaaat

SEQ ID NO: 15118 - DNA, 381 bp, Diabrotica virgifera
aaaacgtatattaaaatataaagcatataaaaggttcatcggtatggagtgtttcttgaatctattcgtgatggcgaattactggacctggaccacgttcaaatccgtgacgagaagggccggtagcatgagcccctataggtttgggatggtctctccctgtgtcagcactgcttaagtctctgtagacgcgtccagttcggcggcctggattgaaaccagtagcgtggcgctgattttgattggggttgaagccagttgcatggcgctgaccagggttcaatccataagaatgctgtccatatgctgcttctaagcataggtatacaaccaaagtgaccaatactaacttgcacatcatgattgatgattgtaatgaat

SEQ ID NO: 15119 - DNA, 384 bp, Diabrotica virgifera
ccgagccgttctttaaaatttagaggttttgcaatattttaccgttaaagaacggactaatatatcttggccaaacaaaaagttcagtctataggtgaaaaaatgatagatttcacgtaaaaatatttaaaaaatatttgaaagttctaaaatgagggccagattataacgaatccgtgaagacgtaaagctgattttgctttctttatttttttttattaaataactaaaaattaaaaaaaatagtttttgcttataaaaggtttcttatacattttagagaaaaataattcaaataaaaattgtacttagatcttaaaatgttctttaatttgcgaatttctagattaaaatacataaacaattgaccgagatactaaaatt

SEQ ID NO: 15120 - DNA, 382 bp, Diabrotica virgifera
gccaacagaaacagacttagtcgtccgtagaacaggtaaacaaaatgaagatgatcgcagttttattcttgtgcgtagtggttgcagtaaatgcagttagcgagtgtccagactttcctggtgtaggaattatgaaagctggagaaagcaaaccagtccaaggaacctgcaacattgccacctgccatgaagatggatccatttccatgttaacatgtcctgcagaagccgctcttccaccatgcaagtttatagacggtgacaagactaaattgtaccctgactgttgtccccagtactggtgcccaccaaaaaactgagtcaataaagaaataaaaagaaaaaatgatattgttttttattattttataaaataaatttt

SEQ ID NO: 15121 - DNA, 382 bp, Diabrotica virgifera
gtcagtcagttaagagctaaagggtgtcgaatttaataaaatagaaaaatgaaccacacaaggcaactgtttgctcttggtagagctattaacaaccaagttgtaagaaatgcatccgttgatgtaggacctaggaccgccaggctaaaggaacttcaaaagaaattacaggttgacgatggagtaccagtccacttaaaaggcggtgttaaagataaactcctttaccaatttactctccttttaacagttgttggtttaggtatgtctgccgaagccatttacagaattatgactggcaagaaataaacatccatgtgttacttagtttaaatagtacctttatataatataatttacttcagaaataaatgtaattaat

SEQ ID NO: 15122 - DNA, 379 bp, Diabrotica virgifera
cggagaatatggtaaaaattaataaaatacggtatacttacagataaactccgttataattgaaataacatgaaatatatatgcacagtacacatctaaattactaaacacgtaaacacaaacctaagcaacggaagtgaacaacacaagactgtactacacacaatacagtcacaatcggaacgatgttatgttatttaagaacagtgaagactaagaccattgattaaaaaagattttttaaatagtcttttagtcttttttaaacaatgctaagacagtttgattgaaataaataaaggaatattacaacaggtgcctgttgtttccgacaattcaagacaatgaacctgccgcagtgtgccatgagtcattttta

SEQ ID NO: 15123 - DNA, 382 bp, Diabrotica virgifera
tattccacagggtgttccgaactttaagaaaaaacacagttaattgttacacccggtataaaatgacatttacccgtccagcaacaccactattacatcgattttatcaaataataaggttatctaaaggccatactaaaaaaatcactcagatcggacaacaggtttaggaaattcgagacatccaacgtgtacaattcagcgagctagtcgatttccttgctctcaagtgtatttgtagaataaaatcatcatcattctctttgtattatccctatgcggggtctatcaatgttaatcccctttaccaacatgtcctgccttaccgtctcccccaggtcttctttggtcttcctctcctactccttccaggaatctgcac

SEQ ID NO: 15124 - DNA, 380 bp, Diabrotica virgifera
ctgtagttgggttttaatttcagtattttataaatgctagaatattccacagggtgacgcgaactttgagaaaaatcacagtttgattggtacacccggtgtacaatgacaatttacctgtctagcagcagtgttatcgcagcgatattgttaaggaatagggctgtaacatgttggaaaatcacttaaatcggacaacagctgtgggaaattcgagacattaaaaacgaccaatttttgaggtggtgcgttaatttcttggagaagtgtatttattttaagacataattttcaaaatatatttctctacgaaatacgaaatgtaattaaaaatatttttaatcctgatgctggttcgttaaattgataaatgtaatttc

SEQ ID NO: 15125 - DNA, 380 bp, Diabrotica virgifera
attacaattacaaattctactggtcagtcgattctaggaagtgttcacaaaaaataatgtataataaaagaatataaaaaatctattgtatttcttataataataaaggtagatacatctaataattatactctacttgtaagtaaaatcaatgtaattaatcgtcactcaagatcaaagtatgtatcaaaggaagttgcggatcaattatggagtatcttccaattgggctactgagcagttattgagataatcaatctaaccaacccaacctaaaaatataatgcgtatatatttgccttcatttacttatcaattccataatgaaggaattctcttaaaaacaatcttagttgaagttatttagatcttttctcttc

SEQ ID NO: 15126 - DNA, 377 bp, Diabrotica virgifera
gaatttgtttgcaaagacggttgcaaattacgaaaagaaaatctaagacaatcattatgtctgagtactccatagaaatgcctttttaatgatgtgctttgcatggtatattccctatttaaaaataaagggtcggggaggtgaaggatggagggttcacaaatgacagatgtatgtatcgtaagaatgtgtcccccagagaacaaaaatggcagaactgttccctcatttccttaaatctaataaatgctgccaagtattgaggtggactgtttccattgacccactctgtattatattgtttaatttgtaaattttagtagtggagcagttgcttatgagatttatttttttaaaatattaattgtccaaatgta

SEQ ID NO: 15127 - DNA, 380 bp, Diabrotica virgifera
cctggtttttatctgaacactgttttcagattgttgaacggtattcacgtcttcttcggtgtgtgtatagaacgtttacaaaaatagtttcttaattattgtgtttatccataaagcttaggaattctgcacaaaacttgacaggtcttatagctctaacatctttagttttttaatagctgcgtgaattcttcaatgataatcagtggtcctgtttgacattccgtgtcttcaatggtatcctgcctttcatcgacgaaagttacttccacttatttcttccgtgtgtagttttctttcacacttaatagttgtctgtcttggttatctgtcaaacattaaactcttctagctctaggcttgtataagcctgcagcttc

SEQ ID NO: 15128 - DNA, 379 bp, Diabrotica virgifera
ggccagaataagagataaactaaaaacattaatttgaactgccaatatttaaatttacatttttttaaattctcggaaagggaccatgtaatgcggatgaagtaaaatggtccagcaaaaaatatggtaagtacgtagttggcggagaaacactacggataacgaagactggatgaaaattattaatgaagctaggccctcctagggtttaaaggaagaatgacgatgatagacaggcatgttaaaaacctaatctgatgtatccgattcctcatctttaagtaattcacaaatttaaactgtaacttagttctctttccagcgggcaatttacgtaaaccttctcccaacagctgcaaaaaatcatcaacgccgtcag

SEQ ID NO: 15129 - DNA, 381 bp, Diabrotica virgifera
taaaattttatttttaagctcatccctaaaaatatttaatattaataatataaaaatatttaattataaatatattgttaataaataaatttaatttatttcttaaaaaattagatatatttaaaaacgaataacatttcattacaaaaaaattatttaaaatatttattttacaataaaaattttaattttttagctcttttaaatcgaaaataataaatatataattattaattaataatccctgatacacaaggtacaaaaaataaatttttcttttataaaaataaaatattctctcacaatactaattaactatcattaaataaaatttttctttacttttactaaaaaatattttattattttaaaataaataaa

SEQ ID NO: 15130 - DNA, 282 bp, Diabrotica virgifera
ttatcccagccattcaaaagaacggaaaaatatacactaaaaaaattatgtcgggctcgccaaaaattacctacataacctaaattttttgaaaattcaaaatttttcaattttgatccaaaaatctgaaaaaaactatatttttgggcatcaatgtatgttcatagtttttttcagattgtttaaagaaaagatcgctcagtaaacactaaaaatatgaggggggaaccaaaaaatgggttttttcgaatgttgagctttccggcgagaaaatggcaaaac

SEQ ID NO: 15131 - DNA, 380 bp, Diabrotica virgifera
aaaatcgaagatagaatttattgatggtcttcgttatcatgaaagaacactgcaattagcttgtcacaagacgctggccgatgtattgtctgtatctcgtgatcaggaagaccatcaataaatgtttaaacatccgacttttccatcatgtcttcgcgagctgttggatatgcatatcgtactaacctggcaatatctagctcatattcttgaagagcttcatcccacttctgacaccaatgttacgagtttatttatttattaactttattttaattaaaatcactttatttattagtctttatttttaacttacacactaaacatataatttatatctaattattttgtacaattaaaaaagcacaataaagtaataa

SEQ ID NO: 15132 - DNA, 379 bp, Diabrotica virgifera
  SmartBlast Evalue=2E-18; Info=Hexokinase (Fragment) n=20 Tax= Gryllinae RepID=Q0ZBT3_GRYPE
ttacagagtttctatcgatgtcctcatcatattcagtcctgatgaagtctaaagcgccgtcatccccaaacgctccccattccaggttgatcagcacgtttccagagcccatgtccacgtcgctccatgtttcggcgttcgcttgtttttccacgtaacaagtgttggagccggtacccacaatagaacctatccgtgttgagtgattttgtctgacttgttgaaggcgcattaataagcgttgcattggggtcatggtttccataacattttggttcatgttccagtattgttgaacttccataccattcatgtgcatttgcatccttcttaattcgttttctgcttcttcaaccggaacgacaccactaacttcatg

SEQ ID NO: 15133 - DNA, 380 bp, Diabrotica virgifera
aaaggctccgtagaaatactttttattgtgtcgtttatctcgtttgcatctaaaataatttgcagttctgttacatactcggaaatttttttatgtaactcttgcacattgtcctctttaaaaaactttaaactatatttccaaaacttacataaaaatgaagtttgctcttcttcatctaaaggcttaagcaaaagtgccggtgtttgaagagcattttcaagcatttccttttcatggaaacgagacgtcacataaatttgagtaacattagtttgtacaaggcttttaatcaatgtaatcgtttgttttgagtaagttggactaatctcatcaaagccatcgaacaaaacaacaaccttaggaatcatgaatctttt

SEQ ID NO: 15134 - DNA, 378 bp, Diabrotica virgifera
  SmartBlast Evalue=5E-50; Info=FACT complex subunit Ssrp1 n=1 Tax=Camponotus floridanus RepID=E2AEI3_9HYME
taacgtccctcttggagtaaggcaatggatttctctgaatatagcaatagcatctccagatatattgataacactggctttatccattacctgttgttggaatgcttcaactggatctacatcaccagctaattcattagcaggaatgaaaaacctcatttccatgaggctcactggagcatcatcattctggtgaaattccatagtaatctcattttttcctcctgtgcattgtgaaacatggttaagcggtatttcaaatgaactattggaaccaacatcaaaacttaaaactgatccagtaaatttagctgtaccccaattccaaccttttgtacttagttctttctctaacatttctattttgtaggcattact

SEQ ID NO: 15135 - DNA, 379 bp, Diabrotica virgifera
gtggagaaggttgtctagtcttcgctaggttgctattcggaattgctgtttgaaatttggatttttggggggttatgaatgtgctgacagcattatgtcattaattttaagttgccttgaacataatgtgttttacacagtttgctgtttctaatgttatatgatgcttttatacctactgaacttgtgtcagattttctccttctagattcttcatgttttaattgttgttttaaaatattccattatttaaattattttggatatatttgaagctatcttcagaaatttccaaggtgtatggctctaaatatatatacttcattggatttaaaagtacagtatacagtgtgtacttaaccaaatttgtctggttgga

SEQ ID NO: 15136 - DNA, 379 bp, Diabrotica virgifera
taaaattctcacatgtactgaaatgaaaaatatataaatatgggtaaagatcaagaagtaaaatcacactcaaaaaggaaaataaatgaagctacagagccaacagaattaggttctgcagatgaggacctactaaatattataaacagtgatgatgacagtacagatgatgatatggagaattctgggaatgaagatacagatgaagaagattccgatgaagaagacagcgaaggaactggagaagaaagtgacagtgatcaagatgaagatgatgatagtgatgtaaacgaagatgatagtgatacatatgaggatagtgattctgggaatagtgattatttagatgaagatagtgaagatgataatgaggctatag

SEQ ID NO: 15137 - DNA, 376 bp, Diabrotica virgifera
taagattgtcctcattttttctctgtgaatattatgaaaggggtcatttgtcgcgtaatatttagtagtagtatcatctaccctttttattgtacaggacacatttcttctttaaagtgttcaactttttatatctcagttctaaacatttcatcaatgaacttcgtttctgatggtactgaaattgttactaagcccatttacaagattattggttccagattccaatacctcattactgaatttagtaaatttattagatcgcaaagatggcaatatacgctctctttgtattgtaattttgcaagatatatttattgtttattgagtacccttaaagtatattgtttttcgaatactatccatgaagtacttt

SEQ ID NO: 15138 - DNA, 379 bp, Diabrotica virgifera
  SmartBlast Evalue=5E-37; Info=Troponin C n=3 Tax=Apocrita RepID= E2AW14_9HYME
gtccagagcagccaaaatttcttttagggtacctgttgtgatatatccgttaccttccctatcgtataacctgaaagcttccttaagttcgttctgtgtttcagcctcatcaagatcctcttctaggaaaggatagatgatttcatagaagccatcgaagttcacttgtccagtcctgtcagggtcatttttggtaatcagatcatttagggcgacttcatcgaataattgaccaatggtgttcaaaatggtggcgattttaatggtctcgatgaagcctgttttgcccgtgtcgaacatggtgaaggcttttttgatgatctccatcttttggtcatcgtccccactcattttgctaattttttaatgtcactttaat

SEQ ID NO: 15139 - DNA, 375 bp, Diabrotica virgifera
tatttatatttttatttattttaaaataataaaatattttttagtaaaagtaaagaaaaattttatttaatgatagttaattagtattgtgagagaatattttatttttataaaagaaaatttatttttgtaccttgtgtatcagggattattaattaataattatatatttattattttcgaatttaaaagagctaaaaaattaaaatttttattgtaaaataaatattttaaataatttttttgtaatgaaatgttattcgtttttaaatatatctaattttttaagaaataaattaaatttatttattaacaatatatttataattaaatatttttatattattaatattaaatatttttagggatgagctt

SEQ ID NO: 15140 - DNA, 378 bp, Diabrotica virgifera
  SmartBlast Evalue=1E-12; Info=Endonuclease-reverse transcriptase n=1 Tax=Bombyx mori RepID=D5LB38_BOMMO
tacattggcttggatggcagagacgttcgcataattgcaaatttatattggaatcaaacataagttttagtagacggtttggaatcacaggctcttaatattaaaaaaaggagtatggcagggatgcctcttgtcgcccttgctttttaacgtttactccgaaagaattttcagaaatgcactttctgaaaaacaagaaggaataactgtgaagggcgaagtcatcaataatttgcgatatgcggacaacacaatactcattccttctgctcaagaagatctgcaaacattacctgacagctgtcgttaagagctgttgacaagtggatcaaacttgtttaccttggatatcaattaaattctaacgcagagagtcac

SEQ ID NO: 15141 - DNA, 379 bp, Diabrotica virgifera
  SmartBlast Evalue=1E-20; Info=Endonuclease-reverse transcriptase n=1 Tax=Bombyx mori RepID=D7F170_BOMMO
ggcgtttgaaacgcatgttgagctgcgacagggagatgcgctggcgtgtctcctcttcaacatagctctggaaaagacggtcagagatgcccgaatagacaacagaggaaatatttttaataaatcatcccaaattttggcatatgcagatgacgtggacctagtttcccgcacaacgcgccagctagaagaaatgtataccaccttctcaaatgcctcaaaaaatatgggcctgaaagtaaacgaggagaaaactaagatgattggcatcaacacccaacaatagagccagaaacatcggtcaccaattcactgttgataactctacctttgaagtggtggacaaattcacatacttaggctccctgatcaccaagga

SEQ ID NO: 15142 - DNA, 378 bp, Diabrotica virgifera
ttttgtaataatggtgagtttatacattttacgggtgactaatatggtttgtaatttgaatttacaaactttattactaactcttaaaatgtttaagtttgccattgttataattttaaaacttctttttcgatttcttaaaaacaggtgatgtggcgcttacaacactattcggcagacccattcaattatctgtgccactcttgattaatttataactcataatgcccatgtataattttatttcaaaaatatattttattatttacacctgcatttagagatatttataaacttatattgagaatgttaggaggcatatgtctaacctttgccacagtgcagtactacagagtagaagcagccaaccgttagtgt

SEQ ID NO: 15143 - DNA, 377 bp, Diabrotica virgifera
  SmartBlast Evalue=6E-37; Info=Phd finger protein (Fragment) n=1 Tax=Aedes aegypti RepID=Q0IGB2_AEDAE
gcgtggagatgtcttggtctgacttactttccctattgctgtagatactcctacttcttctgggtgtttttaattcttctacttcagagtccgatgttttgtcgcattctgaacactgccaaccatagagcttagattttttcggtaaacggcttaaaggtggattgagacagtccaaatgataatagagatggcaggtgtcgcattttgctagaagatgttggtctcgacgttgtcgacacgttccacattcgttcagttgcagcggatctttgttagcatgactactcaatactcgatcagtacgcccagatggtatattctgcaatggaaatcctacgcccatcttcaaggcagctgccgtcggtaccatcata

SEQ ID NO: 15144 - DNA, 376 bp, Diabrotica virgifera
  SmartBlast Evalue=2E-51; Info=Bicaudal D n=1 Tax=Tribolium castaneum RepID=D6WU88_TRICA
gagttggaaagagtcaccgctgaaagagatcgaatgctccaagaaaataatgatatgggcaaagacaaggaggacagaaatatggaatgcaaaaaactcagaacggaactacgagaagtcaaatttagagaaaatcgtcttatatctgattattcggaattggaagaggagaatattgctcttcaaaaacaagtttctgccttgaaaagctctcaagttgaatttgagagtttgaagcatgaaataagaagattgcaagaagagatggatttattgaatttgcagttggaagaaatgacaaaatttaaaaaaaattagctgagaaacatatggaagaagcccttgaatcattacagagtgaacgagaagcaaaata

SEQ ID NO: 15145 - DNA, 378 bp, Diabrotica virgifera
ctggaaattttcgttcttcatatgtgaactcattcatgagacatgcttcttttatcatagctttaacaatctgacattttacttattttacgaaagatataattcacacggtgtaaaatcttgcgaagaaggttgatggtctaacttactttttccagtacaaacattttctcggatttgtttatgttctatggcatacattttaggtaaattttgttgaatatcaaaattaccaggcgtttttcctatctgtctatttcatctcagcacttttctttgattcaaagctgaaatgtcattatgcaatggataagataacaactgttgatgtacaggttggtgaagaatgagtgaaataaacgaaccacctattaccta

SEQ ID NO: 15146 - DNA, 376 bp, Diabrotica virgifera
  SmartBlast Evalue=6E-16; Info=Endonuclease-reverse transcriptase n=1 Tax=Bombyx mori RepID=D7F172_BOMMO
gtctagtataactaaagatggtaactgtgaagatgtagttcggagacgttttagtatggcaaaaaatgcgatgagtcgcctaataaagtttggaaagacagatctatctctcaaaatatcaagatgagactagtgaatgcccttgtattctcaatatttctatacggagcagagacttggactcttcgcgcatgcgagcgccaaaaaaatggatgcctttgagatgtggtgctggagaagaatgctgcgcataccttggacagctcataggacaaacgtttccattctaaaccaactgaagattaaaaaaaaaggctgtccacaatatgtctgcaacgaatactgcaattctttgttcacgtggttcgcagaggtg

SEQ ID NO: 15147 - DNA, 372 bp, Diabrotica virgifera
aataggcgcgttccaaatgacatgaaaaccgtccttcgtactgccctcgtcatgcgcattataaaaaatgcgttccaagcgaacatgaacgatgattcgtatcgtacactgtgttgttccaagcgatccatgtaccgtttcgaaatcggtaactgaacggtccttttgatacatgccttcaagcagaaactatttgtactgacttgcgcagttagaattgttttcatttttactggtcactgctatgagatcagctgatgattcaatctaaataatccaaaatccacgctattagtacctgtgaatcttgattttcgtttaaataattattagttcttttttttttcaaattaatcttaaaaatatggataa

SEQ ID NO: 15148 - DNA, 363 bp, Diabrotica virgifera
gcccccaactcgattccaactccatacaggtcaccgtctagcatatatagtgaaaccaactttctgaaacttccagccccctaggtggtcatgtgacccacccagagcccaattaggcttttcatgtttctatttcttatcctagacgcatcgagaactagcgaaaaacttcaaataaaaaatttgcaagatcaaaaagttctgtgcgaaaaattccctttttccaatttttggcgggaaatttaaattttagaacgattcaatatttcaaatgagtacaaaaaaataactaagacattcgttttcacgaaaaaaatatacaacgtgcacccctgcacaatatttcaccctgaactcttcaaa

SEQ ID NO: 15149 - DNA, 374 bp, Diabrotica virgifera
  SmartBlast Evalue=8E-24; Info=Diphthamide biosynthesis protein 1 n=1 Tax=Harpegnathos saltator RepID=E2B7P5_9HYME
aaagtgtatgagatgagtgctgtgttttgaaaatattgttttagattttatatgagtctcagtaattatattttggtgatattaattaagaatgtcagaaactgccgttgtggtaaaagccaaaccagaaaggaaagtatttaaggctacgaaagttacgaaaattccacaatccttgttgaacaatcctaaacttcaatctgctattgaaggtttgcctaaaaactataactttgaaattcccaaaacgatatggcgaattcaggaattaaaagccaagacggttgctttacaaatgccagaaggtcttttgttgtttccaccaccatagcagatataataaaggagttttctggagctgattctatcataat

SEQ ID NO: 15150 - DNA, 377 bp, Diabrotica virgifera
ggccaggagagggtgctacgggctcctttatttagatggacttactcaagttttttatgtattttgacccgtagaatacgaattttttgggtaacagttgatccggatgtcgataagattgttataaacacagaactcgaggaattacataacatcgatttttcgcaaaataaaacattttttgtatttcttgggcaattctaagtaaaaaatgttcttacaagttctttcgtaggatgcatagttttcgagataaacgcggtggaactttcaaaaaaccgagaaattgcaatttttgaacgcgaataaagtttgattaaaaaataaaatagcaattctgctgacagcatttcaaagtttaagtcaaattataccgg

SEQ ID NO: 15151 - DNA, 365 bp, Diabrotica virgifera
agcaggcgcggatccaaggggggtcaatggggtcaattgccccctccttgagacttcgcctggtgtcgcctttttaagaaagagataattacgattgaaaataaatagtgagttttgtgtactgttgacaactgaataacggaatgaaacataaaacagaattccttctccaaagtacgtgttctcggtcttactgtatggtgtcgagtcttggactgtgaataaaatcgatctacttacctaaatcgccttgaggctttcgaaatgtggttctatagaagaattttaaaagtatcttgggtgaagaagattcgaaactccacgtactagaacgtctcagcaagactactgagattatagaaggc

SEQ ID NO: 15152 - DNA, 376 bp, Diabrotica virgifera
caagcatattcaactctcaatcttttaaaataaatactttggaaataatttctaacaacacactcatgaatgtcaagttttagataatgaaaattatttaatcatcagtatcatcaatcatatttactccttttttaagtagattagaccattttttttgtttttacaatttgttagcctttgctcactttatttctttcttcctgcatgtccaattctctcacgttcattccttttacgaatttttttttcatatacttcctcaatactattactgaaatactgatcgtgggttaagtaaatagcggcaatgaaacagtgagggcaaaagtctttctgaatagtaactacatttaagagcagccaactaactata

SEQ ID NO: 15153 - DNA, 373 bp, Diabrotica virgifera
ttttatttttaactgaacattgtagatatattatactgagatgccaaataaatatataaatgtttatagcaaaaacaatcctattttttaatatacgggttttctaaacacatcttaaagcatcaatacaattgaaagcaatgtttaccttagttaataaaattacagcatgtagtcaaaaattaaattaggcaaaagcgcaataaaaattattaaataaaacaaatttcaaggcattttcgccatcttgattgagccaaaatattgtttgtgtgcaatttggagagacgaattgcactgagtattctatattttttcgaaaacttaaaagtggagagatcttctaagttcttacagactcatcaagacggtc

SEQ ID NO: 15154 - DNA, 375 bp, Diabrotica virgifera
  SmartBlast Evalue=3E-14; Info=Putative accessory gland protein (Fragment) n=5 Tax=Gryllus RepID=Q0ZBY2_GRYPE
gcctcctagatattggggttcatttatttttttaaaatgtggttcgaagttttaccaggttttggaattattgtggcggctatggctcttccacatgtttctgcgtatgttatcaacaatttagttgtaggcaatcaataccgacgtagtatgtacactattgaacaaaggttacaatatttgagggacaggagacttactggacatccctataaagttcaaggattggaagcaataccagatgcataaataaacattagtttaaagtttagcaaggctgaaataaattacaggacttcagtacagaaacatatgtagaatatacaggctagatatacaactttgtttatttcttaatatatttattactgaaac

SEQ ID NO: 15155 - DNA, 375 bp, Diabrotica virgifera
  SmartBlast Evalue=2E-50; Info=Cathepsin L-like cysteine proteinase CAL1 (Fragment) n=1 Tax=Diabrotica virgifera virgifera RepID=Q9GU62_DIAVI
ttgttgttctttaagaaaaatcaaaatgaaactatttgtcgccttcgcagccatcattttgagcgtcagtgctttgtcactcaacgaccattgggaaaactttaaggtcaaacatggcaaagcttacaaaaacccaatcgaggaaagagtccgcttttcagttttccaatccaatctgaaactcatcaacgaacacaatgccaaatacgatcaaggtcttgtaggttacacaatggcagtcaaccagttcgctgacatgacccaagaagagttcaaagccaagctcggtatgcaagcaaagaatatccctaacatcaagacaactcgtcatgttcaagatgtaaatgttgaggttccagactccattgactggag

SEQ ID NO: 15156 - DNA, 374 bp, Diabrotica virgifera
gtgcaaacgctggtagtagactgactgggtcgaacgaaaccccactgttatgttaactgatttgcggtttcttagataaaccagagaaagccataaattgagaaactttatggatttcaagaattttgatataacgaggctggggacatcgtaatccattaagaagtgtttctgtgaaagaaacattcatcttatacaatctgtttaacgtttcatttaacatctgctctgtatttacatgtgaatttatatgacacatattagatatttcgttttgcgaaaagttattaaaaaataacaattaaaattagcagaaaatagtaattacagcgtaatgctataagaataataaaatattttcatggtaatgaagt

SEQ ID NO: 15157 - DNA, 375 bp, Diabrotica virgifera
  SmartBlast Evalue=3E-15; Info=Zinc finger protein n=1 Tax=Culex quinquefasciatus RepID=B0WNY0_CULQU
ctccgaaataatcagccatttgcaagaactttgattgaggttaatcattgcagtagtttttttgaactaaataaattttccataaaaaaatgattggaaagagcaatttgctagtaagacaaatggtcagaacgccattgtcagagcttcccacgatcacggtggtgtacctggagttaaccttccctttgatattaacaacagattcaagctaacagctatgatgattgctttctttggttcaggatttggtgcaccattccttattgttagacaccaactcacaaaagcttaaattatgagtggtatgtgttagtcaagttgtatttaatttttatatgtaaataagtatttcaacaataaataaagataatt

SEQ ID NO: 15158 - DNA, 372 bp, Diabrotica virgifera
taaacaaatgttaataggtataataataggtgaaccaaaaggtataataatgtttaaatacgtttttctcaaaactttacttttgtgagttagtggatttttccagtacgcccacgatttgctaaatatttgcgaggttactcatattttttgagatagactaaattgaatcattgcgtctccaattcatataaaatatataaacaatattttttcagacctcaaagaagcaaatatgtacaaccataggttattcgaaaaactaggtgttccagggttattggggggatttttactaacatggcgctgagtcttattttttaattacatacagcacaaaaaatgaaaaaaaattaattctttgaatgtggg

SEQ ID NO: 15159 - DNA, 373 bp, Diabrotica virgifera
tcgaacttttagaaaaaacacagtattttcgcaaccccaacaaacaacatctgtttgacatacatgtaaacaatacatacgagtgaaattaattcagactaaatgcgcgcagcgctcgatgcaaacttaatgcgcaatttactcagttgcgcagttttcgcagtttatcttatatatttttttattccttacattgcaatctttcatttagtgaaggatttaacgtggcacaagatggcacaataaaagtaatacgctgtcaaacattaattttatcaaaaattgtataggtttttagacggcctattatatcaaaatcaaaatcacctttccgtgaaactaactatgctattttaatctttaaagtatgtac

SEQ ID NO: 15160 - DNA, 371 bp, Diabrotica virgifera
tttttatttattttaaaataataaaatattttttagtaaaagtaaagaaaaattttatttaatgatagttaattagtattgtgagagaatattttatttttataaaagaaaaatttattttttgtaccttgtgtatcagggattattaattaataattatatatttatattttcgaatttaaaagagctaaaaaaattaaaatttttattgtaaaataaatattttaaataattttttttgaatgaaatgttattcgtttttaaatatatctaatttttttaagaaataaattaaatttatttattaacaatatatttataattaaatatttttatattattaatattaaatattttttagggatgagctt

SEQ ID NO: 15161 - DNA, 372 bp, Diabrotica virgifera
tctttctgagctctggctcagcagataggcatctgcttaaactctaaacacctagcgactttcacggggcattcggcaacggttctgcaaaaggaggatttagacaatccattctaaatacctcgttgagataaaatgtcacaaataacttatctcaacaactcattcaaacaagaccaaacaggggggaatgcgtgtgacaacataaaagaccaaaaaaaactagtatactggattcaaacgggatatcaaaccatttaataagatcaaaaaaaaataacgtaacacatgacataggaaatactacatcattacgtttccaatccaaagtccaatctaggacataaaagcttttcatgaaagttcaccaga

SEQ ID NO: 15162 - DNA, 374 bp, Diabrotica virgifera
aacgttcctaaattgtcaacataacagccaaaattatcttttaagagtatttcttaccactgattgtactgtgatgacatcatcaactcttcgtgagtctttgccatgtttactattgccttccatgtttgtcggtcctgtgcaactatttcccattgtctcactcccattttctctagatcttctctgactgcatctctccacctttttttaggtcgtcctacagaccttctcccatatggcctttcccaaaatacactgaaacacagtggcggctcgtgatttttacaataggggaggcatacctaactgtaaaatatctagacaaatttacactaaaaaaaatcctccaaaaaaatctaatttaaggcccc

SEQ ID NO: 15163 - DNA, 373 bp, Diabrotica virgifera
atggcaataagttaaagatgaaattcctagcaactttgtttatagcatttgctgtactctattcagctctatcagttcctcagttttcaattggtggcagtaatgtcccagacataagatacgaattgaaagctgtagaggctcttaaagaagcctacgaattgtacccaaatgacgccctcaagcgcgtagaagccttttcggaccttttcggagaagtgtacactatagacaatggttggaacgttgttagtgcctgcgacactttctacactaacaaacaacgtatttatgtagatattatagttaaagaatcagcattaaccgcagacaacacaactgagacaactattaaaatttttagttaaatgtg

SEQ ID NO: 15164 - DNA, 374 bp, Diabrotica virgifera
gtccgggattatttctagggccggcagaccaaagcacataagtcaaaaaaaccgatttttctttttgtacatgcacatgtccatatattttttctccaccgactgactcaagcacatacgtcatacacatttatttcacattgattttaagtagcgtacattttcaacctttcaattcctataaatctatagacgttataaatattatgtgaaaaagtacacctgatataaatattaagttttgctgatttataggcatgactcatgactaaagttgttaggtacctcaattgcttgacattatcgtcttacttgtttaagaatatacagatatttaaattactacttaaaacatgttttgtctacgggcctag

SEQ ID NO: 15165 - DNA, 372 bp, Diabrotica virgifera
atcagcatcaccaacgaccatctctcataaaagccgccgtgtgccgaagagcaacagggggttactgcgagctgtacaggcttcaagaacgagtgctgattttacaactgatactatcaggaaataggtttttcgtgcccagttgctttaaacgaactctattaagaaaataacaagaatctacccttgtatttccaagaagaacaacgtccaaatttaacgggacctctacactgacgaacagcaatctctaaaaaacaatatgaggacatctggagtaagcggaaacagcgccattgcattattgttcctcataacaagctctataattctacaatctgctacaataagcgcacaacaacaggcaaggta

SEQ ID NO: 15166 - DNA, 366 bp, Diabrotica virgifera
gttcttacgatgtcagttggaccagtataaaaacaaaattcgacaccgattgtcggcatccgtttgtaaaacataggcggcgcaatagaaattaatgagtaaacttttatttttaaattatggttcaatatttgttaaacagtaataatgttgttaattgttcacatttctttatgaaattgacaccaaagataattaaaaatacataatacaaatgaaatttaacgtgcttattaatttgagaactaaagaaataagactacactttgaatatacacataaaatacttacatgaaaacgaacaattccttttccagtcgaattgtctaattcatgactaatgaagagatcacttttactactgta

SEQ ID NO: 15167 - DNA, 372 bp, Diabrotica virgifera
caaagcttcattttaaagtcatagaccatctctatcaatcttaaggaccgtcaaatttgaaatcctgaaagatatagatatttactagaaaactgttttttgggcatatccttcaggcaaccaagccatcttaactttgagtcttccatgtcactataaatcctcacagtacagaactcaccatggtagagctgcagctcaaattgagggagcagagcaagataaatactgtatatgtaagcgctcagattggaacgttaattatacagggtttatctggtttgaacaaacatcatcatgaaaatatctgtggcacgaaattctcttaagtagaggtagccagacctgctggagaagagcagcaggcaaatc

SEQ ID NO: 15168 - DNA, 369 bp, Diabrotica virgifera
agaacctaataatttttttcattttgggcttattagtctgtcaggtatttacggcagcaatagaaaatggaaatgaaaggaagttcgaagtgaagcgtaatgttgatgctgtaggcacttttaaagaggaaactgtagaggttgtgcaaaaagtcaagagtggtgctggccaagaaaatgttgaaataaatcacgttgacgacaatacaggaggcgaacttgtagtgcaaccacaacccaaacccctgataagtgaaaataaacatgaatgtcgagaaggctttgtcgccgataggtatggcgtatgcagagaggtattctaatatagcaagaactatctatattagaataaacagtactaaaaaaata

SEQ ID NO: 15169 - DNA, 370 bp, Diabrotica virgifera
attaaggaatcctaccagtctatttgctttttggacttgatctcttacttctttgtcaacatctccatagctggacagtttaaaggtattttattttcattacttgttcaatactgatgcaatcaaattctattttacatctgattggttcttagctgaatactaatattttagttttctgagtgatcagattgtcacattaaattcttttgcttttatgttagatctgtggactaatctatgcataatatcttcatcttggtctcacaacattgcatcgtctgaacatttttacttttttgtttcctattctgaatcctccccatttgttgacactttttgtgattccatccatgcttaaattgaagag

SEQ ID NO: 15170 - DNA, 370 bp, Diabrotica virgifera
  SmartBlast Evalue=9E-18; Info=Tubulin-specific chaperone cofactor E-like protein n=2 Tax=Formicidae RepID=E2AEE5_9HYME
gctgccactttgtttctttgttcagctccacctctgatcgaagaggtgtagaaagtacgttaaagcttaagtttacgaatttaaggcggggcatttgttctaggatgccaaaaacctctggccattcttgtaatttattttggccaaatcaagttcttcgacacctgcacatttggcgaccaaggcatctttttctccggcagtagcaatatcgcagtcgttgagaactaggagcgccggaacgacggctcttggagatttacaaggcacaaatagtggacacagaaatgccttcatcctcggacccatctgaatctgtcgagctctcgccatacttttgtcaagggcctctagcagggacgcatggtaa

SEQ ID NO: 15171 - DNA, 372 bp, Diabrotica virgifera
atttacttatgtacttttttttactttgccccttactatttgctacaagtacacagtcaatcaaaaatgggggctatgtattaattgtggtttactgatgtaaagatgtggttagaggatcgatataagtcttgcattaaaaataatttagcattgaaataatgacataatattacaaaattcccatatgaaaaatatgcaagaggtagaaaaacaaaagaaaaggaaaccgaatactcaaactgtaagaaagtatcatggactctgctttactcgagaacaaaaattggttgcaacagtatggtatcatgaaagatcttatacaggaatatcttttgaccaactctgccaaaattttcttactcgattcca

SEQ ID NO: 15172 - DNA, 372 bp, Diabrotica virgifera
ttttatttattttaaaataataaaatattttttagtaaaagtaaagaaaaattttatttaatgatagttaattagtattgtgagagaatattttattttataaaagaaaatttatttttgtaccttgtgtatcagggattattaattaataattatatacttattattttcgaatttaaaagagctaaaaaattaaaatttttattgtaaaataaatattttaaataatttttttgtaatgaaatgttattcgtttttaaatatatctaatttttttaagaaataaattaaatttatttattaacaatatatttataattaaatatttttatattattaatattaaatatttttagggatgagcttaaaaat

SEQ ID NO: 15173 - DNA, 365 bp, Diabrotica virgifera
ttatgttataaaatgcataatttcccgttatttaagcttgaaacccagattggggtagtcaaagaaatatacattcaattcaccctataactcacttttagttaacattaaaaggtttttctggtaaggaatttatttagttttttattagctttaactttggtaataaaacttttttgtaaaaacttactagtttttgagttatttataaaaaatcggttaaaaacatgcatttttctcacgaaaaattaaaatctttaatctttttaataagtcaaaaagtcccgatttatttcaataactttatataacaaatttttcccagagttagtccctccatcgaattgtggggttacttttcaatc

SEQ ID NO: 15174 - DNA, 370 bp, Diabrotica virgifera
ggaaacggtaaactttagaaaaaaatgttataggacttttttgttctacattgtgtattatatccataccttaaaggaacgcactattttcggggacaccctgtataatgaaccatcaagtcaggagacttggcatctatggtgatttaagtaacctgtatgtatattgtatatccatatttacagattacttcaatcgccattgatgagaagtatcctgatttcatgcttcattatttgctctgaatttgtgccgtatttgacatttttgcttccatgagaattttggtcattttgcagttcatttcatgcaatatttgttacaggtttctctgtgtcctctcttagcgtactcgcgcaccaaggcaat

SEQ ID NO: 15175 - DNA, 364 bp, Diabrotica virgifera
tgttcccaaggaactcgagcgagagccatccaaccaacgcattatcaaatgccaaacttgcttttaataaataaataactttaataaatttaataactaataaattaattgatttattataacaaaattttttaatttgtttaaataaagattgtttaaataattataaagctttcaaatgagaatatttgtgtttttaacattaaaaggtacacttgtagtaagtttacctaaaaaagtctacaactggaaaaaatatgtattttcttttcttataaataaattaatctattacatataacaaaacaaaagcaagtttgacatttaacaatgcgtcagctagacgcctccactcgagttgctt

SEQ ID NO: 15176 - DNA, 360 bp, Diabrotica virgifera
ggcccgcgcgttcgccagatttgacgcccctgtgattttaccttgtagggagtatgtacttaaagataaagtttttgccaatttgaagttctccgtgccaatttggaaaagtctgtagaaagacttgtttcactgtgtataagcgttgccaaaaatgaattgatgaacgtggtttacattttgagcataaaatgtaaagcatgcacttctttttacctacttatttacaataaactttttttttacttcagttatttttgcttttatttatacaaaacggttaactgacttttggtctacccggtatataacattgcatggcaactactatagatagaggttattataatctcccacgct

SEQ ID NO: 15177 - DNA, 370 bp, Diabrotica virgifera
gcaaaagcaaaataaactctaattttagaatttagaaattaaatcgcggtttttgaattgggattaagtaatccaattattacaataattaattattgatatattcgatagtattaattcgataactattcctgtattacgtggtttaacccatagatgttgacgttgttatttttttcgcatttaaataaaagtaaaaatttaaaaataagatgacatcaaatgacgatattctttggaaggaatctttttttgaaaaaattttagtgtggataatagtctttcaacgttcactcaaaagtatgatttagatacgcttagaagtcatttgaaaagttatggcacagaactgcagcaacggatgagtgag

SEQ ID NO: 15178 - DNA, 369 bp, Diabrotica virgifera
  SmartBlast Evalue=2E-10; Info=Putative DNA-mediated transposase n=1 Tax=Helicoverpa zea RepID=A4KAD9_HELZE
cccctctatgactgacccagctattagaagagagctccagcaagctcataatattgcaatttgcgatcagattattagaaacaggttacattcggggaatttatttacaagaagaccattgtttgtaccaaagcttacgttagagcagaaaaggactcgactggaatgggccaatggacatttacaaaggcatgacaacagatgcggaaacgtgttattttctgatgaaaccaaaattagcattttatgggataatcgccgaattagcatttgaaggaacccaaatcgacaggatagacttaatcaagctgtccaaagagtcccatatcaaggtggctccataatgtttggggcggcatcatgctaaat

SEQ ID NO: 15179 - DNA, 366 bp, Diabrotica virgifera
  SmartBlast Evalue=1E-36; Info=Zinc finger MYM-type protein 1 (Fragment) n=1 Tax=Camponotus floridanus RepID=E2A2B3_9HYME
atgagattaatcaagcacgatattttgccctggttgttgattcgacacctgatgcgtcacatagtgaccagctggcggtagttttacggtatgtgtccctaaaagatgcttgtgccacagagcggcttgtaaaactcttgccacgtatatcgcacaagtctgaaggtcttgaagaggcaatccttttgtctcttcaagatctgaaactggacattcgaaattgtcgtggccaaagttatgacaatgcatcaaacatgtcgggcccttacagtggattacagtcaaggattaaacgaataaaccaccttgcagattatgttccgtgcgtcgcacattcccttaatcttgtaggcagctatgcggccg

SEQ ID NO: 15180 - DNA, 369 bp, Diabrotica virgifera
tattattttaagaagtgtattttgagctgtctgtaaaatatgtaaggtattactaaatgtaccaccccaaacaacaatacaatatcgtattatagattcaatccaagagttatataggatactcaaggtttttttgagagaatgtctcttaataagtaaaatttaggcattaaggatctaattctttttgcaacgtgtgccacatgctcacgccatctcagatgctaatcaattataactcctaaatatttaatatatttagttttttctaaagagggacatggacatgcctgcacactgttgcaatctgaactatgaatttttaaactaatattagttggctgatcagtcccacagtacttaggccac

SEQ ID NO: 15181 - DNA, 370 bp, Diabrotica virgifera
  SmartBlast Evalue=1E-30; Info=Major facilitator superfamily domain-containing protein 10 n=1 Tax=Harpegnathos saltator RepID=E2BNI5_9HYME
gcccctagagatctgaaaatacccataactgttcctttttgctgctccgtgccatattccgacgccattgtcattatacttggaaccaccattgctgttgaaatagcaaacagtagtagtcccaaatacagaacgaaaaattcaaatgctattccaacacatataaaggacggaataattaaccacaatccctttatggctattgacttaattttactaggatgtattcttctcacataaataccttgtatcacagacattgttagccctatcacaaaaaacatccagccttgctgcatggtagtatagttaaatcggtgatggggtgagaaaagtaagagtaaactccaatccactatatataagtaaa

SEQ ID NO: 15182 - DNA, 368 bp, Diabrotica virgifera
atttttatttattttaaaataataaaatattttttagtaaaagtaaagaaaaattttatttaatgatagttaattagtattgtgagagaatattttatttttataaaagaaaaatttattttttgtaccttgtgtatcagggattattaattaataattatatatttattattttcgaatttaaaagagctaaaaaattaaaatttttattgtaaaataaatattttaaataatttttttgtaatgaaatgttattcgtttttaaatatatctaattttttaagaaataaattaaatttatttattaacaatatatttataattaaatatttttatattattaatattaaatatttttagggatgagc

SEQ ID NO: 15183 - DNA, 365 bp, Diabrotica virgifera
ccgtaatttgagaaaaaattttcaattatttttttttatctttagaaggatgtacaagtaattgcatattagaacatagtttttaactccaaacaactttttataataacacttttcaatattgtgaaaaataaagacactttaatcttgatcgaacttcatattttttgacatacctcatataatatagatttgatatctagtaaaaataaataaatacaaaataaacagttttccttgaaaatagtgaagtgtaatttaacattacattaacataaataaataaaatttgtttatctgacatttcaattttatgttgacctttagttgagtgaaacgaaaacaaagtagagttgacgtttcta

SEQ ID NO: 15184 - DNA, 369 bp, Diabrotica virgifera
gctgcgaattgcgcgacagggtcccatctgcaccctgattgccctgatattttcagtaatgtcggattcatcaatcgtttcgttcgtatattgacgtcaccaaatgaatgaattaggtttacgagatttcgtaacagcaatacatttttattgttgaaatgtttgtctgataaaaatcggtccgggttacccggagttccgggttatcgggggccgacttatcggggttccactgtactgaaattaaaactcaaccatagcttctcaactatatcttaacattatgttcttgattcattcgcttaggttggataacaaaaaagttaggcactccaacaactcgacatgttcttcatcaatacaaggtgt

SEQ ID NO: 15185 - DNA, 365 bp, Diabrotica virgifera
tcgtctctgatatcgtttcttgtatacattttcttgtatcatttcttgtacgtacatttgtgccctgtatgacactatgcaagttcttgtatcgaaaattgtatgaaattcggcacgtgattggtcgaaattttgtttgtcaccctgtcacgttacattggtatggtagtactgcgtctacagctgattttaaggattttataaaatttataaacttttaaaaacataaatttaacattttaatgttaatcagagtttttacgttgactgttgattatttgtgttttttattttgttttgatatttgtgctaaaatatttgcattagaattatcttcagtttgatccaaattaggaactattgtt

SEQ ID NO: 15186 - DNA, 364 bp, Diabrotica virgifera
atttacgtaatgattaaacttttagtggaacaagaaaagagatggaaaatgtggcaaaaaagcaaattttggtcgtaaagtagtctttagtagtaaagtcgtaaaatataaatttaaattaaaataaatatttgctcattgactacgtatttattggatatgggcctaaaagttaaataaatttataaaaattaaaatatttatattaaaacaatcttatatcaaaaacaaaattctgatggaatattgaaaaatttgcaacgaaaaataagaaaataatgatccacgtttaaacataattttcaggcgaaaaaagcagcttaaacttcaactaagatatattaacttgttccatttataatac

SEQ ID NO: 15187 - DNA, 368 bp, Diabrotica virgifera
gttaacctgcttccgtaatacttgggaaaacaactaataatttcttggatattatgtttttctggaagttttgaagttccggtacaattttctcatagaatgctatttcggatttgaatgtcatttgaacattaaatgcagcttgagatccttcactttgtggaatgatcttaccgacaagatgtaaaacatccttcttcttggtactggtttcttgtatggtaacatatatcttgaataattctcctccataattttctccaggttccactaagttggttatttcacttccaattatgttttgaccatcatcaatatatttttctaacagtttttctatgttttttatagtcatcctaacaatatct

SEQ ID NO: 15188 - DNA, 356 bp, Diabrotica virgifera
tgtaacatctataatgcaaaaatacttatctcacttatatactcacggacaaaaatattgcatatgcatgtggaatgaaattttttgtgctgctatccttagccctctgtatcataggaataagatttttttacgaatgccattttttaaagtatcacatagaggctttaatcggatttaaatctgatctgggctatatgctggccagtataattttaaattgaatctcatcaagataagtattcactatgctagcgacaagaagaagtgcattagcaccaatatgtcatatccaatatggctttcaaatggcaacacatgattttccaaaaatgttttcaatgcacacatcagct

SEQ ID NO: 15189 - DNA, 364 bp, Diabrotica virgifera
aacatagtttatttcaataatattacaaaattgtttaaaaaacgcaacaaaactcaattcaactcaacaatcatcaattaacagacacccacaaacgattataaaaaacaaaacatatttctatcttctttaaaaatcaagcaggtacatcacccaacgttttatgtagtgtctgaagaactaattccaattctttcagattgttcctggcttgttgacacatttttccttcaggaagagcatctggttcgtgcttcaacaattctatacattgagtaagaagacttttacactcaagcatagatgcataaacaatattagggtcagtcttacgcctggcaatttctgcaagagctgcgataag

SEQ ID NO: 15190 - DNA, 368 bp, Diabrotica virgifera
  SmartBlast Evalue=1E-26; Info=KIF1-binding protein-like protein n=1 Tax=Harpegnathos saltator RepID=E2C380_9HYME
actttatctttaaaagaatttataaagtttgtataatgagtaataccattatcgattaagtggtttatttttgctagactatgtggagtaggtcgggattttgtatctcttaatttgtcatattttatatctaaaatatcggcataagttctagctaattcaaaccaaacttgtctacaatattgtagataatattgagaatttacattagcaattatgttttcaagaagttttatccttcttttgtgcaatttagcttgattctctggatcatcttcaaagaatattagattataatataactgtgtttgatctaatactatttctatgaaatcagatgctagagtttctaaagtgtaatattcttg

SEQ ID NO: 15191 - DNA, 366 bp, Diabrotica virgifera
tttatttattttaaaataataaaatattttttagtaaaagtaaagaaaaattttatttaatgatagttaattagtattgtgagagaatattttatttttataaaagaaaaatttattttttgtaccttgtgtatcagggattattaattaataattatatatttattattttcgaatttaaaagagctaaaaaattaaaatttttattgtaaaataaatattttaaatatttttttgtaatgaaatgttattcgtttttaaatatatctaattttttaagaaataaattaaatttatttattaacaatatatttataattaaatatttttatattattaatattaaatatttttagggatgagctt

SEQ ID NO: 15192 - DNA, 368 bp, Diabrotica virgifera
  SmartBlast Evalue=4E-28; Info=Pyruvate kinase n=1 Tax= Camponotus floridanus RepID=E2AJ75_9HYME
ggaattgatatcaagggcacacaaatggtccaagtggtttttcttctccaaagcttggagttggaatggcaaaacattttgagccatccttccggtcctgacaatagccttcatgtttgaattttctttcctagaaccttaccagccgtctcagaaaaggataaatcagatttgagatttggtgtagaacaaaaagtagacatcgttttcgcctctttcatccgtgatggcggcgctttgactgaaatcagaaacattctaggggaagaaggaaaaagaattattataatttcgaagattgaaaaccaacaaggtatgaccaatttggacgaaattattgaagcttccgacggtatcatggtagctcg

SEQ ID NO: 15193 - DNA, 368 bp, Diabrotica virgifera
attttggtcgatattttattgtttttgccaattttgcaaaaattggcaaaattactaactatttagtgattattaactatttagtaattattttttgccaattttactaaaactggcaaaaattaccgactaaaatatctagaaagttgcgtccgagtttagcgaacagactatattacatatcaacgtacattcacttaatgttttgatttaacttgtttgcaaatgaatcatcacgtttgtgcaaagatatattggaacaactataacatgtatgagttttaacctgatttgaatacaattacttggaaaatatattttatttaaagacatttagtattattagtattagatgttttgtactagtt

SEQ ID NO: 15194 - DNA, 368 bp, Diabrotica virgifera
agatataaaaaggaaagagaaaaatataaaaagaagaaggaagataagatggcaaagaaagattataactaaacattcaaatttttatttgtttgtattgtgtattcgtgctttgggcatgagacctttttggcaagatgtttatgatcaattttcattatgttttattttttggtaccttcagtttctagttttcttcattgctgaattcaaagttcagcttattatgtgtgtttttctataaagttacgattcaagtacgtgtagtttctttttaaaggtctttgtttacagtcatataatggatttgaggcaaaacttaccactttagactgtgactaagatatttaacagatgatatttgacaa

SEQ ID NO: 15195 - DNA, 367 bp, Diabrotica virgifera
cattggggttcgaacctgcgtattatagggctgttagattgtaaatcagagcactctaccatttagccatctagacgtatcattcatttgggaaaatacaccaactgaacgtttattacaccataaactttttgacaattgcttattaccttatgaatttaatcaaattagtttgatttttgtgaatttaaaataataaaatacaacaaaatatagagtaagaaaacaatatattagatgaagattggtagaaattttgttcgtaatcaaattatgtaaattaaaatattacctactaatataggtaagtacattatttttacatttttcaaatggatatgtagataattttttatttacaatactg

SEQ ID NO: 15196 - DNA, 366 bp, Diabrotica virgifera
ctcgtatctctcaacctcatcttctaggtgtgaaaacacagacaaatcatttggatcatacaattttctttttcttcgaatactactattattcgtcttgtccgcaatacaactcctttcgattgggattactttgggttccgttggaggaaaattgttttctttatttttttcatttacttccttcgttttcttctcaccacttataacctttttattatcagctgcaagtctatcaaattctaaaggtttctcattgctcaaggttttaacactattttcttctcctccatctttcttatcagccggaggtaatttttgcacttccgaggaaaatcttctatgctcatatcgctatccgttaac

SEQ ID NO: 15197 - DNA, 366 bp, Diabrotica virgifera
ttttatttattttaaaataataaaatattttttagtaaaagtaaagaaaaattttatttaatgatagttaattagtattgtgagagaatattttatttttataaaagaaaaatttattttttgtaccttgtgtatcagggattattaattaataattatatatttatattttcgaatttaaaagagctaaaaaaattaaaatttttatgtaaaataaatattttaaataatttttttgtaatgaaatgttattcgtttttaaatatatctaattttttaagaaataaattaaatttatttattaacaatatatttataattaaatatttttatattattaatattaaatatttttagggatgagct

SEQ ID NO: 15198 - DNA, 363 bp, Diabrotica virgifera
gtgcgctcagaaagtaaatgctttgcagatgatattgacagagaaaagagaggaatgggcaaatggcgctgtaggttatgcaaaaatatgtgtgaagaacttggaatttccataaaacctcggaggcgcataacaagaaagcatatttttgatgacggaactagaggtgctaacttgtcttgtgaaaatgagttgagacgaaagctgtttcttcgttagatagagttattgtagaaattcgtgagcgttttcaacagctacagaattcatcggatacgtttgtttatctaacgccgcccgggtatattattagatccagaccacactgaatgtaatctagacctagactacacatctgacgaa

SEQ ID NO: 15199 - DNA, 364 bp, Diabrotica virgifera
  SmartBlast Evalue=2E-43; Info="Sodium/potassium/calcium exchanger 3, putative n=1 Tax=Pediculus humanus corporis RepID= E0VRE9_PEDHC"
cgatttgagtaaccatggaagtcccaaacaaagaagtacgtccaacgtactggaacctaatgcattacttatacccatagctcctttgcctttctttaccacaactatacttgaggctgcttccggaactccagcaccaatagccaaaaacgaaatacccattactgaatctggtatttggaatgtatcacctataactgttatcatccatgataaaaggtacgaaagaacaccaatccatacaatacatgttataaatgcaactggaatccatttatttgattttagcttctcacaattgggaactgtgaaaaagaatgcgcaatttattggccaatttattatccaggcaatcttttttatt

SEQ ID NO: 15200 - DNA, 366 bp, Diabrotica virgifera
  SmartBlast Evalue=5E-16; Info=Endonuclease-reverse transcriptase n=1 Tax=Bombyx mori RepID=D7F170_BOMMO
gctgccttatttctgtgtttttacttacctgcatatattttgttttgttctggttgattttcaggccactattttgtgcagctcgttgtatttgattgaatgcctctatcatttctcttcttgatcttgcgattatgtcaacatcatctgcaaatgctagtatttgcacgcttttattaattatttttccttgttgtgtccctcattattttctcgagtacaatgttgaacaagatgcatgatagagcgtctccctggcgtagtccctttttcacatctattgtttccgttagttcgttttgtatccggattttactttctacttttagagattcttttatcagttctattagttgtgttggtata

SEQ ID NO: 15201 - DNA, 351 bp, Diabrotica virgifera
attccgtcaaagcttatttcgcaaaattactccgcgacactgtacaaacgcctttgaaattgcccgacaagtcccaagcaatttgatctttataggttccacaaccgatttcggaatcattgtcggtatgtcttcaaacgaatcaaaagattgccgtccgtccgttggacggacagccgggcgggcggcaatctataaatcgcgcttaagtgccaatgtaatttttcattaatcgttttaaagcatattttatgttgaaacaaagtaaaggacccctctttggcgatcggcgcccgcaacatcccggcgcccgtgtgcaccgcacaccctgcacaataggtaaagccgcct

SEQ ID NO: 15202 - DNA, 365 bp, Diabrotica virgifera
gacctctatcaggaacttgttaatataggaagtccaacccccatttcaatacaaaatctcctacataatattaatgaccaaaccttaaggaagatcaatcaatttttaacaatatttcaaattaaaatataaaataaaaatagttatttgaaaatcatatcacaatgaatttaaagaagggaatatggaaaaatccagaccctttgaaaagaggattcccttccagttagtctaaatacgaggactggccaagtacctaagaggtggaggccatgaaactacaagaagaagaagaagagagttgacagtttatagaaccatttatagaacagttgtatttgaagtttatttggtgcattagaaat

SEQ ID NO: 15203 - DNA, 361 bp, Diabrotica virgifera
  SmartBlast Evalue=1E-35; Info=Juvenile hormone epoxide hydrolase-like protein 2 n=2 Tax=Tribolium castaneum RepID= D0W012_TRICA
aagatgtcttcggagaagaacattacttcgtatcgaaatcttgcacagccagtgggcactttaattggtatgctttctattcttagtttagcacgattgtcctcatgaaacagttcagcataaattctcatagaagtagtaattgatcttgacatccagtataccattatattatcaagaagttgagtatatgtaaatttttccgtaagtccaccgtcttcgaggtctttgtacgtcgtatttgttaacgttacaaatttttccaggaggtaggcagctaaccctgttggactttcgcgcaaggcaacacctatcgtatcaggcttggttgcctgaatatgaaatatccgctttccacaag

SEQ ID NO: 15204 - DNA, 365 bp, Diabrotica virgifera
aaattctcaaaaatgaacactatcttagttttggctcttttggtttgcgttgggttaaccgtaagcgcccctcaaaacaatgacttcttatgtgatggctgcgtatcattgtcaaccgtgctcaagaaatatgtacaagaagaacttccattgaaggatcttgaagaagaacttacagctttttgccaagctttatcaggacaattgagagatttttgcgaaaaagaattgattccactagtcgatcaaatctacgacgagcttagcgacacaacgcctcgagaagattgcgaatttttggggttctgtgagaaaaataatataaaaattgtagcactaatttgtaacaaaaattgttttgtcta

SEQ ID NO: 15205 - DNA, 363 bp, Diabrotica virgifera
tgctgaagaaggcttttgatttcactgatgttcttcaacggtttcgaagaagggctaggtgggatcactcgtataccactggagtccactaaaggggtaaatacggagttgtcctccacttcttccagcactgaaggcattatcagcattcccgcggccctcctgccggtagagggtccctctatgtcaagtcctgcagcatttttttttgtacctggaacggaagacttgattgaatttttgtagaatgaagcccggccccgctgtcataccacactcactctatataaatctgacctctactaaactgtttaataatggtctaaaatgtcagaattgattttaataagataatcgcactgg

SEQ ID NO: 15206 - DNA, 364 bp, Diabrotica virgifera
  SmartBlast Evalue=1E-42; Info=Histidine triad nucleotide- binding protein 1 n=1 Tax=Camponotus floridanus RepID=E1ZW70_ 9HYME
ccgatgaagtacaacttgcacaagttgccgaagccggtggagatacaatatttggcaaaatattaagaaaagaaattccatgtaacttcatttatgaggataatttgtgtgttgcttttgacgacgtcaacccacaagctccagtccattttcttgtaattcccaggaaatgtattccacagttatcaaaggctgaagacgatgatgaagctctattgggtcaccttttagtagtggcaaggaaaattgctcagaaaaggaatttgaaaatggttttagaattgtgattaatgatggtcctataggtgctcaatcagtttaccatcttcatatacatgttttgtctggaaggcaaatgcaatgg

SEQ ID NO: 15207 - DNA, 359 bp, Diabrotica virgifera
gtagaaatgaacaaaccaagcacgctgggtgctactaggaacactaccgaatcataatttacaatgtataaactttggaaatcatgatttgggatttacaatgcatatacattgtaaattatgattcggaagtgctcctagtagcatttggcgtgtcttgctttgtttatttttgctgcatcttgattgtaaatttagtataagtagtactatggttatttttttaaataggaggagtaattcaaacttaccgcgccgtaatggttgtctgtaattggtccaaccgcagacaagcttacttcactaaattttgaaattttgacactattgacatatatgaaattttgacactaatggca

SEQ ID NO: 15208 - DNA, 366 bp, Diabrotica virgifera
  SmartBlast Evalue=1E-26; Info=Histone deacetylase n=1 Tax=Culex quinquefasciatus RepID=B0WYC3_CULQU
aatattaacatcccatttaattcggggaacaagacagatgccgactattgggctgtctggcataaacttgtacttcctttggcctactcatacgatccccaatttgtgattgtatcagctggatttgacgccgcatattttgatcccttgggaaacggctataaagttagtcctgaaatgtatggacagtttattcaaacgctcaaacctctagctagcggaaaacagctaatactcctggaaggaggataccacctcgagagtacggctctttccatgactatgtgtgttaaagcactactaggtgatcctttaccagttccaagatttgatgagaagataggaacggagactcgagcgaccatt

SEQ ID NO: 15209 - DNA, 364 bp, Diabrotica virgifera
ttttaacaaggttgtagaaaaattaaattaagttaaagctgttgaatagggcacggcttcttcttcgaagaaaaaaaaattgaattgagtggttccaggtataaccggtcaaatttgaccggcatttgcgacagagttataaacaacagcatttcaatctttgaaccattacctttttactccggcctctttgtacatacaaattttcatatctttaagacactcataacaaaaaatatttatgtcaccaagttatttaattattcatgggtaattacttccctaaaattttagttgaaaattgaagattttgtttggagacccgaattttcggagaaaattgccgtcgaaggaaatctaaaaa

SEQ ID NO: 15210 - DNA, 363 bp, Diabrotica virgifera
gcttggttggtagagcattggaccagagatcgagaggtccccggttcaaatcccggacgattcatattcttttttttttaatttttggtattgttttaataaaaaaaacttaaaagtggtaggtaagaaagttagtttaatatttaaataaaatacaaataaactgttgtgcgtacaaagtacacacacattcttcttttaatatgtacatacctccaccacgtttatatttagaaaaacaaaaactggtacgcctatttgtgttccagagacaaatcgactccatcaatttcaaatttctagtactggtcataggcgtccgttttgggtagggcaacggttattttatcgcataactttttg

SEQ ID NO: 15211 - DNA, 354 bp, Diabrotica virgifera
catatgatgcaccgtttttatgcagaaaaataaaagatcttggcgagtattttcatttcttaatacatcatcaagaactatccaatataataatactaaactagaacaataacagaaaatattactaataagatttcaactaggtgcagagctacaaaaaatgtttaaaaatgatctcctttacaggtaacagaagaattttatattcatcattggcgcgcgtacgggtaatggtctgaatttttcgaagaaaaaaatagtacgccactgagatatgtcaaactaaaaatcatttttgaattcctcgttcaatttacgacaaaaatctttcttaccttttttatacgaggcgcc

SEQ ID NO: 15212 - DNA, 361 bp, Diabrotica virgifera
cttgattaacacgttcgatgtccatcttgaacaaacaccacatgactggtaccacgtacttaaatggtaacgaaataccaccgtcgacacccatgcgtcgtcgacacccttgatgaaaccctcgtgccgacactctgtcggcgtaggcaatgaactagtcatagaggtatgtattaacatagagtgagcctaccttccgcgcttcctgacgacaagatctcatggactggtttgcggcatctctttttaacacattggatcgagaaactaagatgacattaagtgtgaggataggtacggaaggggaggacaactgtcgcagctttactacgcttgagagtgaaacagcactaatccaaat

SEQ ID NO: 15213 - DNA, 361 bp, Diabrotica virgifera
tgtatatgggtcgtcattgttgatatatttttaccacgacagaatataacaagatcatcagcaaatagacgggctttgactaatgggctaagtgacttagcgatgtcattgatggcaataaggaaacgtgcaacactaagagtagaccattgaggaatgccgtttaattggatttttgagtctaaaagaacgttatttattcgaatacgtttcgtctatatagaaaattattaataaatttatatttccttgaattgaacaacttaatagaattcttatatctaatccccaaatggcacgcgttatataataaaagatagccataagccaaacatacatgatcacatccaaataacccatg

SEQ ID NO: 15214 - DNA, 359 bp, Diabrotica virgifera
cgacattatggaggataaccaagtttgtagtaggttgaactaataatatcgcgtttctcgtttctataaaataaggataattgaagctaggcccaaagttgtcacaattatgaggagaaaagcaagaaatgcttggaaaaagaagacagaggttaacaatcaagtagaagttactactcatgaagtaacaaataaaaatgaacatgacaaagtagaaaaaataaatgaggatgataaaatagcaggtaatattgataatagtaacgtagctgatccaattagttatacagaagtatctggtgaggataaaaacgaaaataatgacagggaaggaatgaggagcaagatcaagagagcac

SEQ ID NO: 15215 - DNA, 362 bp, Diabrotica virgifera
  SmartBlast Evalue=3E-40; Info=MICAL-like protein 2 n=1 Tax= Camponotus floridanus RepID=E2AE20_9HYME
gtttatcgaaattcaacagcaaggactagaaaaacaaggtgtaagattggaacaaattattagggagaagtgtgaaggaaaggaagatgctagtaccaatacagatgatgatattcctattgaagtagaagatttaattttacaattattcgaattagttaacgaaaagaatgaattatttaggaagcaaacggaattaatgtatttgagaaggcagcaacgtttagaggaagagcatgcagatgtagaatatcaaattcggtgtctcatgatgcagcccgaagccaataaaactgattccgataaagcacgtgaagaagaattaattaaaaggttagtcgacttagtagaaagacgaaatg

SEQ ID NO: 15216 - DNA, 347 bp, Diabrotica virgifera
tagatcttcagtcttagtgggaagtccctcggaatgccaaaaacagtttaacgcttgtattggtaaatccatcgtaaaacactgaagctggttggtcgtgtagataagcaagatgaagtttaatggcttttaagatatcctggttcccttaatctggctagcagatatcgactattcgagttattggttaatctaactcttggtggggtcaaaggatccagatttatcgatggttctaaagtatccttcttaatgaaatttattggcgaatggaacggattcttgatttacaaatttcgatggcctgcttgtctgtacgtatgtttgtgtttctacttctatctttg

SEQ ID NO: 15217 - DNA, 357 bp, Diabrotica virgifera
caccattggaaggagcgtaaaagtgttttttatgaaatgtttttgactttttggttgtattagttacgatttaataaatgcaaaacgtatcttcacgtgtgcctgtatgcggcagattcgtgcgggtgttataagagttattgtgcgtttaatggtggaagcatatagtttggaccacatatgcggcacgtgtggaggtttgaatttggatgcgaggccatctcagtttttgttcctttggcaagagtggcgggcttcaaaatggcgactgtacatatgtgactaatagcacgataacttttgaacgagactcagatttcaaccaaatttggtatataggttcttgttttgatgtat

SEQ ID NO: 15218 - DNA, 362 bp, Diabrotica virgifera
gacagaattaaaaaaaatgacattagtggataaagtacctatccgtctgacctggaaggtatggaagaagcaaggataaaatgggcaaatcgattccaaatatttgaccaaagtcattggtgcactgaattgtacccatgttcaaatttaaaaaccttcagaatttggtgacaaatttattaatagaaacggatttcctagcataaataggtatacaagtaacgtgtgatgcaaatgaagtgattacaagtgtgctccatggttattgtgctcaatttaaaatccaaaaaacagaagcgaggaattatttaatatcactccttccagagaaagggtgacaattgaaagagtatctgggcggc

SEQ ID NO: 15219 - DNA, 356 bp, Diabrotica virgifera
gtcctgacacctgccacctgacaaacaatgggatgatgctgggaacctttctcggcatggaggaagcgttcagcaataccccatttgaagtaatcattaaagccattcgtgtaaaatgaatagacgaagtaaactgcaggtggatatataatgcattcttaagagtcgcatgatacagttggtgagatcatatcagcacacgttgccaattgatgctcgcaaggaggagtatgggttgattgttatagtaagtagtacaactagtactagtaagaatgctaaaagaggaatacagaaggtgggcctgaaataaatatgaagaaaacggaatacttagcaatatcggaagaagacgt

SEQ ID NO: 15220 - DNA, 362 bp, Diabrotica virgifera
aacttaaggagacttttactttctcaattaaaaaaaaagcgtttgtagttgcagttggttataaaaattataaagggatcacttgttctatattatttaaaatgagagagccacaggtggcgtctgtgagagtccacgactcaattccgtacaacagtataagaaaggcataacatcgtagtaacctgttttttatgggtattgataaatcatgacatttttttggatacctcgaaactatcttatcaccgtataaaaaattattacagtagactccctcaataacgagaactgaaatggcggactaattacctcgttataagcggatctcgttatatcaggcaacaataatattgtgcata

SEQ ID NO: 15221 - DNA, 358 bp, Diabrotica virgifera
gaattgtgtgcgttttagtgtccctgacacctttccccagccatcttgtctcctgaagagcagtaatcatgatcttatatctttttagttcttgcagaagtgcggtttgagctcctggtctatttagcgtcctcacattccagtttccaaatgcatagtccatgtttcgtagcttgagtcgtttccgaaagttccgtcctgtattccgaggcaaatgttcaggtttcgtaacagtgtgttttttccgggagtgggttgtcagcccactgcccaaccttcctcctttatccgggcttaggaccggcagtggtgactcctgagctactcgattcacccatttgtcaccataggcggagtt

SEQ ID NO: 15222 - DNA, 359 bp, Diabrotica virgifera
gtcacaataccatagttggttttgtactttgttatacttttacgttgtaaaattaggtacagtgcacagattctaaaggtgctggtgggatggtgtctatgcgcagtattatagtcggtgttgagagagaaaagtatttgaaataatgaaataaaatattatttcgaatactttctcatacagcgactgtaataatgtgcatatactctatccccccaacggctcctttagaatctgtgcactgcattagcaattaattatatataatttgtaagtgtttgaatatattgtaattaattttgtaacacaatttattaatgttacaatatagttattactgaaataaaaatattgttgaa

SEQ ID NO: 15223 - DNA, 356 bp, Diabrotica virgifera
aaaaattattagtaataccaaaaatctaaaagagtaataaaatgtacgttttgcttttctgaatatttctgatttttgttttcttgttagacaaaaattggttatgctatggctgttcaaaatttgcctaaactcgtgattagttactcgttcagtccattttaactacagctttttcaaaaataagcactttgaaccgatggaacttgcagatcatatgaatagtacatggaaaaagtaacttgtgaagtggtaataataaaatttatttgtgatgctaattagggggtgattttcgcgatttttttaccaaaaaatgggggggaccaacaatattttgagcgtaactcacttac

SEQ ID NO: 15224 - DNA, 357 bp, Diabrotica virgifera
tatgcattctaaatcagtcaaaattgttgaagttattactcatgttaaaataaataaagttttaaatgggttactataaattttaatttttgtggaaatgacgtatgttcatttttcattcttccctaaaaaatctgaaagggtcctcttatttccatcataacttgcttaattttgatgctatcgacttcttatatagctttttgatagttacctttaagtactttattaaaatgtttagtatctatatttaacaaagtgcatcgttttcctgttatttaagcttgaatgctaagatttgagtactcgcggaaaaaaaaatatacattcaattgcatataactcactttgtatatc

SEQ ID NO: 15225 - DNA, 356 bp, Diabrotica virgifera
tgagttatgcaagaagtttattgatttcctcttcccgaagaaaaaaccagcaacagaacaaatcgcttagatatatcaacgatattgtggtattggagccttggatgtattgatatatttgtgatcctgattgatagaagaaatatcattattctatttgtattattcggcgatgacagcttccttgtcttacttggcataaaaatatgtatggttcgtacagtataaatacagttgcacgacatccgcatcatagcaagtaacgtcacactgataccaacacaaaatatttaagtcgtaggtctgttccttttagaatcgtttagccaagtacactggaattacaaccactagac

SEQ ID NO: 15226 - DNA, 358 bp, Diabrotica virgifera
gtccacacttcttctctatcacaaaatctggtgatccaaacattgtacatcaaccgcttgttgacaagaacatcatatttccatctctacatataaaatgtagccagattcaacacttgtcaacagtttgctgagtaattatatcaatattttgcactttttttctgtagtgttgtaatacctattgtatttataaaaaatgggaaatgaaaaaaatattacttgagaacgtaaaattatattctattttcatttattaatcaaatcaattctaaatattgtttgttacaataaggactaaattgtattaaattaaatatatcgaagaaaaaatcaactctattattttcaaataaat

SEQ ID NO: 15227 - DNA, 356 bp, Diabrotica virgifera
ggcgggcttttgcatttcgtagcttagttcagaatccagcagtcgactgaggtattgtacttgtataatataataattatttgaaaatattttgttggccaaccgcctagagccgaaatacatgtattggctatgatccgtttaaatatcgctggacctgtatatacgcatacgcacgtatttacatgcagtggtatctaattatgtcatgtataagttgtgtgcctacatgtaagtacacaacgtatacatgacattaacataattagatgataccactgcatataaatacatacgtgtgcatgtgtatagatgagtgtatacttgaatgtatgcatgcatattatatccatttg

SEQ ID NO: 15228 - DNA, 359 bp, Diabrotica virgifera
gaaaatggttgttcatttaagacttattttatttatttatcaaataaatatttactgttcgaataaattgacaaattaataagctgtaaatatctataaagaagtaaattcgttagtttaacattaaattatcaaaagaaacacaataaaaatataatcaactaataaattttattggacgaataactattcactgatttatttgttgttggtgaaaccggccctaaatcacagaaactacacatcaatgtatttgtttcaatttaacacctattttgacagaaattgaattaatataaccagtaccattttaaaaagatctgtgtgaatggtatatcattatctcaaactagccaatg

SEQ ID NO: 15229 - DNA, 356 bp, Diabrotica virgifera
tggggatgctaatatgaggtttgtgcttttggacttacactttttcaattgttttgcgaaattttttcgtgcccgttttaaccctgtcagtgacgtcgtttcgacttttttaaggggcgcgggttttgtataggcgtgtaagtagcaatatgaggtcggtgcttctgacttaggcttttaaaaatttttgagaattatttatgccgattttagccctttcatgggcgtactttcgtatttttaaggggtgcgagttttgactaggtgtgggatggtaatatgaggtttgtacttttggtcttaggctttttgaattttttgcaaattttttgtgtcgattttaaccttgacagtgg

SEQ ID NO: 15230 - DNA, 359 bp, Diabrotica virgifera
gcatgtagtgctgtgctgaaattgtgacagtatcgtgaattattccaacatggaaccgttagcaataataattcctgtatattcagtagttttgttaatgctccttttacagattctatgggcgtttaaaatcaagaaaaaattgtacaaaatgatcgatgaaggttactactttttggagttggaaacaggctggggaaggaaagttttgaaacctattcctccaggcaacgtagatttatcatccggctctccgagattgatcagcaacatcataattcgccaatgatatcgcgaaaaatgttaacgaaattatggaaattatggaaattgttactacttaaataaataccaaaaac

SEQ ID NO: 15231 - DNA, 358 bp, Diabrotica virgifera
  SmartBlast Evalue=1E-17; Info=Endonuclease-reverse transcriptase n=1 Tax=Bombyx mori RepID=D7F170_BOMMO
atgtaattattcatcatcatcaatggtgctacagctctataaaagagcctcgaccttcccaagtctattacaccagtcagttctgtccattgccaactgttgccagtttgctgcgcctatttttctcccatcctcatcgacaccatccttccatctgagttttggcctacacctatttctacttcccacaggttgtggcataaggattcttctaggagggttgttctgctgtgaacttgctagatgtcctgcccatcttagtcttcctgtttttataagagatactacgtctttaccaccaaatatatgtttatatctgtggtctatctcgtcgttgtaccttctccaccaaacacca

SEQ ID NO: 15232 - DNA, 359 bp, Diabrotica virgifera
ctttaaatcaaaacattcaatgcaatgtaaaattgtatatgtgtctcaccttccaagtctgtatattcaatttcattttctggccaaattgaaaaaacaatagggcataaatatatgtttgtcgttaactccgtgatatataattaacatctttcatggtaccctctctgtggctcagtggtaagagcgcctacctttggatcgaaaggtccgaatggtcgtgagttcgaatctcaccagggtcagaaatttttcatttattataaattaataaatgaaaatagtttttgtccttgtgggatcggtactcaccggagggaccgcagacgttcagatacaattagcgtctctttgcaaag

SEQ ID NO: 15233 - DNA, 357 bp, Diabrotica virgifera
gactttcaataagatcgaatatttccctgcgaaaacgtaatgcgcaggcgatctcaatctggctacgttcaggataagtgcagggcatgctccacgaataagttaattatgtgacacatgagagaagctcgaaacgaatggcaatcgatgaaaagccccattcaacgccaaaagtctctacagacatgaactagtttacttagatattggctgcattcagcagaaaactgcgatgactaatcgattacttagcgatgtgtaatcgctaacgattcttctgaatggtatacttttatgtgtatacgacaactgtcacatttttcaaaatgatttgcaaatacgtgaaagacacccaag

SEQ ID NO: 15234 - DNA, 356 bp, Diabrotica virgifera
  SmartBlast Evalue=5E-16; Info=Endonuclease-reverse transcriptase n=1 Tax=Bombyx mori RepID=D5LB38_BOMMO
atgtttgtattgctgcatggagaattgaataaataccctttcaaatgagctagcgcacgacccctgttctcatttgaaaatggtcgattacgtcatcacgcccagatggatgacgtcttcttcttcttcacgtgccatctccgcaacggaggttggcaatcatcatggctattctgatcttagatgctgctgctctaaacagttcggttgatgtgcatccgtaccattccctcaagttacgcaaccacgaaattcgtctccttcctacacttctcttgccctggattttcccctgtataatcaactgaagtacgttgtatctctcattacgcataacatgccccaggtactgcagc

SEQ ID NO: 15235 - DNA, 357 bp, Diabrotica virgifera
  SmartBlast Evalue=4E-16; Info=Ecto ADP-ribosylhydrolase n=1 Tax= Culex quinquefasciatus RepID=B0X7M9_CULQU
cataggttgaagagtgacagtgaccctgactgcttcaaaataaaattaaattgcgtgtttaaaatctatgtaaattatgtaaagggagagaatattaattaatgtctattatcaaacattttacaatggctaaaatggaagccgctgtgctgaaaagcaaatttaaagggtgtcttctcggagccctcgtcggagattgtactggttccccgtttgaaggagacaccatcacccatggagacaaattgatcattcagaagtatttcgatagaatgcaagatcctacgttcagcgctccatataaatcctacacagatgacacagctatgatgaagtcagtagctaaatttttgactg

SEQ ID NO: 15236 - DNA, 354 bp, Diabrotica virgifera
  SmartBlast Evalue=8E-10; Info=Symplekin n=1 Tax=Aedes aegypti RepID=Q17I55_AEDAE
gttagcatactcagcatagtcttttaaaaactctggtggaacctgattgggtaattttggaatattggtaacaatgaggtacacagctttttctaaagttaaattatccaaaatgaactgctcatttatttcttggggtgtcagattgggatcataaacttcttccgtttcaacttcagcaggttgttcatctaatttgggcttcttggcattctgttgtaacaccagtgattcagatgacaagagtcttttgttgtatttgcgtcgttcatcagcttttggtaccattttgttgatttctgtttgtgagcaacctaattctaataacaatttagtaattgtactgagatattc

SEQ ID NO: 15237 - DNA, 351 bp, Diabrotica virgifera
gccggtaggtcaatttaactgtttttctaaaaaaatgacaactggtgttcttagaaacaaatctattcaagacatcaaactgcgtataagcacaattattcacaaagacaaaaaactaatatcgtaagatattagtgtggtattaggacaaaattgtttgtagaagtataatatatactccaatatatcaggtttaaaaattctatgacatttatcgattcaattcaatattcaaaaattcaatttctacaataaaaattttttgtgaagcttgtcccagaaaataatcacttattactcaagtacaaactttgaatttattttgaatgtacttgctttctttctactatc

SEQ ID NO: 15238 - DNA, 356 bp, Diabrotica virgifera
gtacgtgttccctttctgaaaccttactgggaacaacttcgaactagcttttcgtggtcaatccattaatattcttaacattttactgaacgtgttgataagatcatatcattgtaattcctactacatttatcttcttctaaaggtgcgtatcttctagagatgttggcgaccacattgacccatcttattctattcacagcagctcgaaatagatcagttgacgttagaccagtccactttctaagattgcccaggatatacgtctacgttgggggcccctcttgccctcaatcttaccttatgaataaacggtagaagtaatttattattatgcataatgtggccgaagtaag

SEQ ID NO: 15239 - DNA, 351 bp, Diabrotica virgifera
aacgggatacttaagaaagaaaaaatcattgaaggaaactaaactgtgtattcaaaaataacaaagtcagacaggatcatttgctattaaacttcatattacatacgttatttataataaaactgcttagttatttggttataaagaacttaacttatcagtgcgaaattcccattttgctccggttacggggcaaaacgggaaatgctacggggcaagatggaatgtattttagtcaggctggcaaagtttataaatatgagtaacctacgtcatcatcctcaaaaccttttcgaaggcatcccttttcgaacttcttgcatcctggacatcttttagtcagttgaaacc

SEQ ID NO: 15240 - DNA, 354 bp, Diabrotica virgifera
tccgcgtaccaaataaaagcttattaatagcaagctgaaaacttgttcacaggttaacggtgtccagtcgggcaaactttgatgtatgggaatactggaacaggagaagttttaactgtggaacgtgataaacgcgtcatcctggctagtttatgattgtgaaaactagaggctgtttttaagtttattcaatagccaacgttatataatatatgaaaaatgtttgtccgacaacaatgttgggcattttaaccagtccgacacgtagaacatgtcaaatgacaggaattatgtcgatgataaatagcggtctgatttttgcatgagagttgagagagcagatattgaaagggt

SEQ ID NO: 15241 - DNA, 351 bp, Diabrotica virgifera
tttttttttgttttttcctaaaatattttttttgcaacgaacaaagtttttttaggttttttggatcattccaaacagaaaaggtctttagtgacttttctctaaagttgatagtttttgacatataagcgattaaaaattgaaaaattgcgaaatcggccattttcaaccctcaaaaactatgtgaaaaactgaaaatttgaatgttgccaaggtaggtagatattctttaaacatcgattgatgaaatcccgaagagttttttgcaatacaatattcaaaactcctttgttttttaattgctaatcaagcgtgcgcgacactattttccaccgacagtatggtgcaaat

SEQ ID NO: 15242 - DNA, 354 bp, Diabrotica virgifera
caaaaagcaaaaataaactaataagtatggttttcaattttcagatagaaaacaaagaatataaagtgtgattcattagttttttattcttattatttgaaaataatgcttcaataataatagcaatttggcatttctatcctttaacaatgggtttcattggaggaattttgaaatttttagtcaatagacttttggaattgtctattgtggtggttataatcttgttcattccaaatttaccaccttacagtcagtttacaaaatcagtaaagttacctcctcctcatcctttgaaaggatctctatctctaaaccagaaattaaataatgttgaaataaagtatcaaggaa

SEQ ID NO: 15243 - DNA, 349 bp, Diabrotica virgifera
tttaagaaacgtcttcgaatgcattttcaaagtgcgttattgacatgaggtctgataaggtaattaatttatggggaactcagtttattaaactgaacacaccaaaaccatatggttagggatacatttcgtttcgtaaaacttaacggcccttcttagcatctggtttgtatattaaatgtgaattttatatgacccatattatttcgttttgagaaaagttattaaaacataaaattagcaaaatagtaattctaataaaaataatagtaataaaaaaaagcgtgtcgccacatttatagaaaaagacagcaaatacaataggtgattggtgtgatcgttcatgggt

SEQ ID NO: 15244 - DNA, 354 bp, Diabrotica virgifera
gtgcacgtttcaattgaattattattgtggcaccattggttaacacaatgtttttggaactttttttgcctcttagtaatttttcgataagccagtgtttatcgagatattttgaatatttgtggaatccaccacatatttgtatatggttaagtacgattatagaaacctgttaataatctgaaatttatttataatttatatttttaggtatattttgaaaaagaagccacatctcgataaaaggtgacttatcaaaaaaaggctaagaggcggaaaagttttaaaacattgtgtttaactagtggtaccgcagtaatagtttaattggaacgtacacaaacatttggcggg

SEQ ID NO: 15245 - DNA, 346 bp, Diabrotica virgifera
catttacattaaaatctgctttatttaccatccaatctctccacttcaggtcatttattgtttacatatagtataaatctcattctattataccaaattaaactttcacctttaaattttacaatcgatgacgtcacgcttctaaccatgacttataccaatcttatttccaacaaacctaaagttttttctggattagagagttgctattttagactttacaatagattctcaacatattttttaaacagttttaattatattttcaatcagctattacctacctttacattttaattaaaatccaaaaattaaaactacacttcttgaagctcgcaaccaaaaa

SEQ ID NO: 15246 - DNA, 353 bp, Diabrotica virgifera
agggtatgtgtttaattataaataatatgttgtaatattttctaagattttaatatgttcttggtttatttttaaataactcattttggttttattgacatgtacagccattgtaatattcgttttggagagtaaaataagatggactgagaatttctgtcatacaatttgtcgattaattttaagttatgtataagttatgtaaaataattgtaagaataattatacactgttttatagattttggacatttctgtaaaaactttaaactagttgtacacaaccgggggggcaaaccgatgttatcgtttgcaaaatttttcaggaaaatcaaaaaaaggtattgtgaagag

SEQ ID NO: 15247 - DNA, 345 bp, Diabrotica virgifera
tcacgtctctacacctagcagaagcagagttatagctaatgaaaataggttcacattcgtcaaattccaaatggaatactttaacgtgaaataaccaaaaatgaagcacatttcggggaaaactcattacaacttatttaaagtgttcaaaaaaagcttcattttgttttataaaaaaaaattctagcatcaaaattaaacaagttacgctcaaaataaagttagtcccttttggttttggtaaaaaaaatcgagaagatcaccccccaattagtatctcaaatgaactcaatcgttacgacttcacaagtttcttgactcgtgtatatattgtttatatgatct

SEQ ID NO: 15248 - DNA, 356 bp, Diabrotica virgifera
atctgacataccttcctatagagataatatattttgaacttgggaattttcacagtaatattcgataacaaggtggtaaacaatatgttcagtctcacatgagaagattaacatgatttatacagtttaataacacaaattaatgataaagacagtgataaagacagtgggcggccgtggaataacggcataatcgctggcctcatacgccagtgcacgtgggttcgagccctgccaaagacaaaccattttcatttccaataatgacacgagccgtctcactgtgcctcggagagcacgttaagccatcggtccccctgggctagtgtacatcggcactagttacttaaaacagg

SEQ ID NO: 15249 - DNA, 358 bp, Diabrotica virgifera
agtaagtactcaagttcgagtttagtttcggaagattgtgtgtttgttttctttgttaatataagttctattacgtcgagttcattcaagacatctcgaatggttgtaaaacggacaagacggatctcctcccagaatgatgaaattttacttcaagtacagacgaagatggatgacattcctgatatattttaccttagcggtgattacaatcgtcctaattcatagcctcataaccgaaaaaaaccaccatacaatgttaccgcataaagactgaaaaatctcttcctagcatagcaaatttcaacccgcaaccggggaaatcgatatttttcatgagacttcttgtcgatcgttt

SEQ ID NO: 15250 - DNA, 361 bp, Diabrotica virgifera
ataaattaaaaaatcaaaatggcaaaatttactctctttcttttggcagctgtctttgtagctgttttagctaccaaagaagtcagctcaattgatgctaaagtggttgatgttgcagcagctttcaaagacgatgaacctactgaagcgccaattactgatgctcctgctgcgtgtgactgtgaaacatgtaccactcattgcacagatgaaagcaaattagacccacccaaaaactacgatggaggagtctgtgtagataataaatgtcattgtgtcgaaattgtttaaattatattcctttatattatcaataaatatttttaaatgaaaaaaaaaaaaaaaaaaaaaaaaaaaaaaa

SEQ ID NO: 15251 - DNA, 356 bp, Diabrotica virgifera
gaatcaccaatgttagcgcaacactttgccgctaaatatttaaaattaaaagcttcaaaaaacacacagctagttctacgcagggtaccactgctgcgcataagcgctagaggtacgaccagagagatattagaaaaccggcgaagaatcaacatctaagcaccgtccgcgtgtaacaaaatttctcgtctaaaatcaatcatcggcgtgatacacgaatctaaagttgctgctttggtgcatttaagagtgcagcgctgatgccccacattagaagaaaacaacgacactaaaggttggtacccaattttttatatcagttgtgtgtttggctgaacatcattttatctaaaaat

SEQ ID NO: 15252 - DNA, 354 bp, Diabrotica virgifera
ttttatttatatttttatttattttaaaataataaaatattttttagtaaaagtaaagaaaaattttatttaatgatagttaattagtattgtgagagaatattttatttttataaaagaaaatttatttttgtaccttgtgtatcagggattattaattaataattatatatttattattttcgatttaaaagagctaaaaaattaaaatttttattgtaaaataaatattttaaataatttttttgttaatgaaatgttattcgtttttaaatatatctaattttttaagaaataaattaaatttatttattaacaatatatttataattaaatatttttatattattaata

SEQ ID NO: 15253 - DNA, 351 bp, Diabrotica virgifera
aatccccattcttgagaaaataaatgtacagtagagcgtcgattatccgaacgtcgatcaaccgaacgaccgcttattcgaactatcgactcccgcgtcccgcactcgaataccgagcaagcgttagtaattgacgcttaaaatatcttcaattttcttcaatattgtatccaaaaataatatgttgttgcaaagactgcacttttttgtttagttgctagttgtcattatcaagatataaataaatatgtaggtatataaatatggcttttattcacttgtgaataaatatgtatgactatatcaatatgtatcaatataatgtagttcgattatccgtacaaatcggtt

SEQ ID NO: 15254 - DNA, 355 bp, Diabrotica virgifera
ctgtctttgtagtagctgtagctgttgtagtagctgcagtggtttctattgtagtagcttcagtggtttctgctgtagtcgagtctgtcgtagacgaatctgtagtcgttgaacacgtcgcagtgaaatcgcatatggcaacgctgctgttaaagggtcttccaattggacatgtatggttacttcgtacccattgtccattactcactacgcaagtgtagtagctcaagcagttaccgttttctgaaggaaaagaaccttgttgagtacattgtgattcgcattcgtttgttccaaaaataagaaatattacagccgagataaatattcttaaaacgggaactttgttacaatt

SEQ ID NO: 15255 - DNA, 355 bp, Diabrotica virgifera
aaaaggttgctttactattcgtcttatgcttgggctgtgttttggttttcggacaaaatgataggactactacacagaaaccttcttgtcgaaaagatcagactttagtttgtacaaacccttgtacaacagtgccaacttgtcaaaatccaaatgcaactcgtgagactttaatttcttgcggaggtctttgccttcacgcttgtgtttgcgatgccaaacagggactaattttagacgaaaatactcaaaaatgcgttaagaaagaagactgccctccagcatgcaaaccaaggagaagaaaaaagaatgcattccatgtctatgtcacgaggccacttgtcaaaatcctaaa

SEQ ID NO: 15256 - DNA, 352 bp, Diabrotica virgifera
aaagttagagtgaaagaaacatttattttaaaatttttttaaaatactcttacaaaaaaacccaaaaaagtttagattttattttttattttacttgtttttgtacatttttcaataaaaatttacgcgggacttgatattatctatctacaactactgtaaaaatttggacattctatcatctgaggatccagagatatttgacatcaaaagttaaaaacctagtattcgggaaatcgcaaaaacataaaacactctaataggctataaagctaccggtacacggtaaattgagtgcagacgttaaaaaaacagataaaagaaatgaatgtcgactcgattcaagttctct

SEQ ID NO: 15257 - DNA, 353 bp, Diabrotica virgifera
gcaactgtcagcatggtagaatttaaataaacacacttttttttaataaataatacataatgttgatttattaacaaagcaaattatcaataaggacaacttttgcctgatgttacaaaaagcaaaaataactagtatgggattatgtgtgtaactaacataattgttttactaatattgtaagactatgaccaaactatagaattaatgtttgaactaaaatacctcaccacaaatcaaaaatgagtctacacattcctgtcaccagcaaatcggcaacagcaatggcaattcagtatttgaagaatggatatgtgatagctgtcccaacagatactgtgtatggcatagca

SEQ ID NO: 15258 - DNA, 352 bp, Diabrotica virgifera
aaacaaaatatggtttattaaataaatttcacaaacaatctattcgatacttctatttacagtgtctgtaaccataatactggcatagtgagtacaaatttacattcaaatataaaacctaataatagctatgttcccttatcagctccatcacaactgcattagttcgaacagggccgtctactactgaccttagcttttcgtcctgcacctctccggtcacctcaatgggtgtttcctcctttactggtggaatctgttgactctgcggcaggctgtatttcgaattgggcgaagcctctaggttgtaactcttcttttgggtgttacccattttaacagtagatgctaa

SEQ ID NO: 15259 - DNA, 351 bp, Diabrotica virgifera
tcgtaacgtcaaaattgaattattctgtttatttttgttaacgtggaaactaacttttattacagttacaattgaaattacgcttatcaatttaacgatacagcttcagtaacattttttgacacatttcatatttcatggagaaatgaatttttaaacttttcttaaaataattctgtactgatacctaaaaggtaaaatattgatcttgactaacttttttcatcatcatcgttcctcaacctcttgcatccactgttggatatatgtctcctccatatttttccattgttctctatcttgtgctttctctatccaattttccactgttttcttaagtcatccatccat

SEQ ID NO: 15260 - DNA, 354 bp, Diabrotica virgifera
cagggccacatacctcctcagggcatgttccaccacaaggacatatacctcctcaagggcatgcacccccacaaggacatgcaccaccacaggggcatcctggcgttcctcctggtcatcagagtcatcctcaagggcatccacaaacaccagggcatcctggacctggacatataccacctggtggagcaatgcacccagggcattatccaagtggccatggcatgccacagggtccccctggacaaccaggtcagcaacaccaaggccgaactgctgataatttacatgccttacaaaaagcaatagatacaatggaagaaaaaggtatgcaagaagatcagaggtattcac

SEQ ID NO: 15261 - DNA, 351 bp, Diabrotica virgifera
catatgcatactgtggataaaagaaattgttaacaaaaatagtgatatacagaactcttatcaaacacgtcctcacttatgtacatgtcagaaatgtagacgattgaaaaaagcgacgaagaacctttaggttgttttcaacgtaaactagtagactagtttatgaaggcatgaaggaaaacggattatgacgtagacgatagttttgagcattaccgcctttatagcgatagtatggtatgttcatcaaaacaaacagaattcggtggctgggcaacttagagagaatgaacaagatggagccgtaaaacacatttataaccaaagactggatggagtgagaagaggcag

SEQ ID NO: 15262 - DNA, 352 bp, Diabrotica virgifera
cctacgtttctccaacatctggagtttccaataattttcttaaataatcactttgtattgtggtaaagtttataaagctcaccaaatacagcaaacgaaatccaaatgaatccaaaatagacaaaatacgacgataaacaatgagaaatagatattacaaacataacctctgtaactttttgtatgccgaaccagaagtcacgtggtttggattgcctaatacatagatacacgcgcggaaatttgaaaatgaacgcaaattgaatagtaaatgtcctctcttaaaatataggacattggtatatgttcatagaatgtcttgtggtaacattccaccaataatttaatcaga

SEQ ID NO: 15263 - DNA, 357 bp, Diabrotica virgifera
accaaataagtgaccgtaaaaatttggtgaatggtcccatggtactgcgttttaacaagaacatatataatgttatatattcagccctgtgatgtaacaaacccgttataaataacgtgtacacgttatgttaacataacgtttgattataacagcctgtataacgtgttgccaaaaattagatgtgatgtatcatgtttttaacgtgcacgttatccagcatgttattttcaaaacgttaaagcatcgtcttgcgcgacaagaataacagtatacagaaattgaatacgttagaggaagacagacataaacatgcagcgtgcggcgaagtacgcatcttgttcatcgcacttacac

SEQ ID NO: 15264 - DNA, 353 bp, Diabrotica virgifera
tcattgtctactaggactatagatgccacatgatgatacagtaagtcttgttcatggtatgagtaatatccaatttattggtgtaattaattatttagaaattaattgtttataaaattgattgaattgtttcttttactgtatatagtacagtaatttgtaattaatttcaaattgtttttatttatttttataatctatattgaggaaaaatatcatttttattaatgtattatgttgctatggctatgaatgactaatatgtttgtaaaaggggcaacaataattgataaagcttccatgaaatatatgacagtgtagtcaactatactaaaatcacaatcaagatgcac

SEQ ID NO: 15265 - DNA, 349 bp, Diabrotica virgifera
tttttatttattttaaaataataaaatattttttagtaaaagtaaagaaaaattttatttaatgatagttaattagtattgtgagagaatattttatttttataaaagaaaaatttattttttgtaccttgtgtatcagggattattaattaataattatatatttattattttcgaatttaaaagagctaaaaaattaaaatttttattgtaaaataaatattttaaattaatttttttgttaatgaaatgttattcgtttttaaatatatctaattttttaagaaataaattaaatttatttattaacaatatatttataattaaatatttttatattattaatatt

SEQ ID NO: 15266 - DNA, 340 bp, Diabrotica virgifera
atcgccaatttttggctaaatgactgagtgctttcttttaatcttttgcagaatttctgctttcgtgtctgttgttaagctctaggatttcctgtacttgttttttctaaagcctctcttttttttctgcatattctagtcgcttgtattctcgtttcgttataaatttctctgacatttcttgtctttctttgaagttggttaagcctagcttgctttttttcctctactgcagttctgaattcatcatcataccattccacgtttctatgcatttttagcttttacgacagtttcttcttaagattccatttcttatttgtttttattaattgtctac

SEQ ID NO: 15267 - DNA, 349 bp, Diabrotica virgifera
acatatttgtttacgaaaaaaatggctgacactcttttgtaatgaaaagtcctattcctacagtcacgatagacattagatgttaactgtttgaacgtataaattgaatatgacgcatgtgcaaagaagccagggacagagtacattaatgcaaattatgttgcttggatacttaaattgacagttatatgcgaattcaactacagcgtttatactattaatatttagttattactaagccatcaaaaactgtttttgtcttaatgactgtctaatccaaaagtgtgctattagtatgacgtaaaatacaatatcagtttatcattatttaaaaattgtatttcaaatg

SEQ ID NO: 15268 - DNA, 352 bp, Diabrotica virgifera
atttttatttattttaaaataataaaatattttttagtaaaagtaaagaaaaattttatttaatgatagttaattagtattgtgagagaatattttatttttataaaagaaaaatttatttttgtaccttgtgtatcagggattattaattaataattatatatttattattttcgaatttaaaagagctaaaaaattaaaatttttattgtaaaataaatattttaaataatttttttgtaatgaaatgttattcgtttttaaatatatctaatttttttaagaaataaattaaatttatttattaacaatatatttataattaaatattttatattattaatattaaata

SEQ ID NO: 15269 - DNA, 351 bp, Diabrotica virgifera
atttatattttattatttaaataataaaatattttttagtaaaagtaaagaaaaattttatttaatgatagttaattagtattgtgagagaatattttattttataaaagaaaatttatttttgtacttgtgtatcagggattattaattaataattatatatttattattttcgaatttaaaagagctaaaaaattaaaatttttattgtaaaataaatattttaaataatttttttgtaatgaaatgttattcgtttttaaatatatctaattttttaagaaataaattaaatttatttattaacaatatatttataattaaatatttttatattattaatattaaata

SEQ ID NO: 15270 - DNA, 350 bp, Diabrotica virgifera
ggccttgacaattatccagtaaccaggaccatatgattggccaatataattaaaagtgcgaataaaagttcagagcgtagaaataggtgtcgcttttccgaacttgcacggtcccaatatcctttcattggcccatctaagattttaaaggcgcattcaagcagaaaactgcttcacgtgtacccattccgctcttgaaaccaaattgtgtctcgccgtttagctcttccggttttctgaacattcttgtatggaggatgcaaaggaatcctttaagcagatagctcgtaaagctgatcaattagtgccgttctttgtgacttaaagatcattataaatgttaaataaag

SEQ ID NO: 15271 - DNA, 348 bp, Diabrotica virgifera
tctaaataaaatttaaactagcacccaattttttgaagttatacttctttaggcgcgttgggagtaaattttatgtgcgcgaaatccatcaaaatcttggtacccgcgcagcttaaacgttatacgtcctctgattgggtaattacaatgacctgtcaacaattgttcaatatgtcggttattttattaatacgtcaatggttatgggtaaacaaattgtatgtagtatattagtttttattgttgtgaggacagacacaaaaagcaagtttataattgtagtgactttttaaacagtttttaaaagcaaccggtacataattttaaatgtttcagtattgtattaaa

SEQ ID NO: 15272 - DNA, 349 bp, Diabrotica virgifera
  SmartBlast Evalue=2E-20; Info=Endonuclease-reverse transcriptase n=1 Tax=Bombyx mori RepID=D7F170_BOMMO
gtttcccatccaacgtagccgttctattgaatgttatgatatccggatcctggtatattttgtatagttcaaagttgtaccttcttcgccaaattccgttttcttttgtgcccttctatatgtgtcgcaagatttttctttcaaaggtggctagcaatgtttcctatcttttagtgagtgtccaggtttctgagccgtatgtgagtaccggtcttattaaggttttgtatatttggcattttgtttttatttgcgacgttatctgatcttagttgccgaattaagccatggtaacttttattggcaataaatattcgcctcttcacttcctccgctacgttattatcag

SEQ ID NO: 15273 - DNA, 348 bp, Diabrotica virgifera
atttattttaaaataataaaatattttttagtaaaagtaaagaaaaattttatttaatgatagttaattagtattgtgagagaatattttatttttataaaagaaaaatttattttttgtaccttgtgtatcagggattattaattaataattatatatttattattttcgaatttaaaagagcttaaaaaaaatttaaaattttttattgtaaaaataaatattttaaataatttttttgaatgaaatgttattcgtttttaaatatatctaattttttaagaaataaattaaatttatttattaacaatatatttataattaaatattttttatattattaatatt

SEQ ID NO: 15274 - DNA, 348 bp, Diabrotica virgifera
aatgctccattttttgtttatgttcaaagtaaaacagggagaatagggaatctccatagggtagctacctctagactgattattaattctgttccagaaattaaacaggacatagctaacatatcaataataggagctaataaaataaaggtcgaattaacttcttatacaagcgcaaataaattattaacagcacagaccttaaaagataaatacgatacatacatcccaatgttttttacacatgtaaggggggtcgtaagacaaatagacttagaattatcggaacaggaattaaaagaaattattaaaaccgaaattgggcaacaattttgaagtaagtcacgt

SEQ ID NO: 15275 - DNA, 341 bp, Diabrotica virgifera
  misc_feature (223)..(223): n is a, c, g, or t
gcagaatcaatgtctatcaacgctttatcgatgcaaacttttagctatagaaactttcagcatactgagctactgctagcgcgaaaatggcaagttgccgactcacggctttgaataaagaggctaatgaagacattaagtaacttatttcgaatttgacacgtttgcggatccgcgctgctggattccagcatagtttactgcatccagcatgtaaaaaacncctgctggatccagcaattgcaatctctagtcgttaagggtaacgcaccgtaagaaataaaaagaaagaaaaaatgactaaaacgtaaaaaatatattgactcatttattcatcagcc

SEQ ID NO: 15276 - DNA, 348 bp, Diabrotica virgifera
gcctcgatattttgtgagagtggtgcaaggtccctataccataggttgtatggtaactttgacattgacaaatgaaatattgtcatcgtgacgtcacccagacgatcaattttacgaattgtttgtaaacataataggatacgtggtttggaggctatattttgttattaaatatcgttagtgttttaatttgtgtttatatcttgagatataatgtatctatagatatcattaagtgtttttagtataataacttaaacccaaaactcttttacaagtgttaagatacattttaatgtggttgtattaagtacctacttacttactggattttctttctgctgtatt

SEQ ID NO: 15277 - DNA, 348 bp, Diabrotica virgifera
tatttattttaaaataataaaatattttttagtaaaagtaaagaaaaattttatttaatgatagttaattagtattgtgagagaatattttatttttataaaagaaaatttattttttgtaccttgtgtatcagggattattaattaataattatatatttattattttcgaatttaaaagagctaaaaaaattaaaatttttattgaaaataaatattttaaataattttttttgtaatgaaatgttattcgtttttaaatatatctaattttttaagaaataaattaaatttatttattaacaatatatttataattaaatattttttatattattaaatattaaa

SEQ ID NO: 15278 - DNA, 349 bp, Diabrotica virgifera
atggtaatacactcaaacagtatttgcctacgtatcggaaggtgcctacgccaataaatactcatcggaaagggaatccattagacaaatcatcgacaacataaaaaccgttctacacgaccacatcaacaggtcgatgtggatgaatcacacgcacaagacctatgccctcaacaaattgcgaaatgttagagcgttcatcggcgctccagatgaagttttcgatgaaaacgaatttgagaaaattctcggtgttgatgagatcgacattttaagattgaacaatacattggatatagtacgagcagtggacaagagtcgtgacaggtacaacttgaacttgtccaag

SEQ ID NO: 15279 - DNA, 348 bp, Diabrotica virgifera
  SmartBlast Evalue=5E-32; Info="Rho-associated protein kinase, putative n=1 Tax=Pediculus humanus corporis RepID=E0VY20_PEDHC"
cggcgcgtcaaaaggcggatttgaactcacaagaaaaggagcgacagatctctatgttgtccgtcgactatcggcaaattcagcaacgactgcagaaattggagggagaatatagacaggaagtggaaaagacgaaggcgttacacagtcagatcgagcaggaacaacagaagaagacgattatgcaatcggaaatgggcaatctgcaggccgagctcgccaagctcaaggtcaaagaatctcagctgttgcacgaacttagtcatttacaggatttcaagaaagccctagaagaagaaatagtgaggctaaaaagtagctggcaacgagaccaactccaaatgaaag

SEQ ID NO: 15280 - DNA, 345 bp, Diabrotica virgifera
taaattagtacatataaacaaacagttgttataaatattaatttgacggttgaaagtcatcacttttataattttaactatttagaatgggaaataagccacaatattattaaaaaatgatttttattaacgtttcgacgcccaaatcgggtgccgttgtcaaaatacaaaatactactaatataaacaaaaatgttgttgcttagtaaaaaaaattcttctaataatttatttaatttgactcatttatatcggcaattcagatacatatgatacattttaaagtagaagataattatttatatgatattatattatattatttatattatatgatacatttat

SEQ ID NO: 15281 - DNA, 346 bp, Diabrotica virgifera
ggctaactatataatttgttttttagggtttcgttacaagactgtaactcataaactcttcaatatttacactgaattcctcgaaaaagcaacttttttatcaattacgtttgaatattggcttaaaaggcattttaaaattttatgtaatgtccacacaatattaataaacccggaaattcttagatgagaccggagtatcgttcaaagcgaaatatacgcagaaaattatccgcaaaaatatgaatattaggagatcaaaataatatcacttactttttcaatattaccacgaaataatatgttgaagtagtaccaggtatctaagatactagtcaatattcag

SEQ ID NO: 15282 - DNA, 348 bp, Diabrotica virgifera
  SmartBlast Evalue=7E-36; Info=Cytochrome P450-like protein n=3 Tax=Tribolium castaneum RepID=D6X2T2_TRICA
tttttaaaagaaattaagtagaattttatttaaactcttggtacaaatttaacctttatttctccagaagatcgtaacactaaatctgctgcgtaaacgacatcttcgggcctggtgactggttccagtttgaactttcgcagtattccacacagaacagctttgatttctaaaagtgcaaatctttgtcctatacaattcctacttcctgcactgaagggtatataaacaaaaggatgtcttttaatggaattctctaacaaaaatcggtcagggtcgaatttctcgggattctcccaaaattccggtcttcgatgcatatcgtatatatcaatattcacattgcaa

SEQ ID NO: 15283 - DNA, 345 bp, Diabrotica virgifera
gcctgtggtaacagaggaagaagtaaaatgagaaaatcattactaaaaatctatgtaaaccttaactctatagggaaaaaagtttacgtctgccaaagaaatctaattaataagaactggtggatattgaatgtgggtagtaagtttaagagggtgtaaaaaagaagagcgaacgaaagacatggatatagttgaaaagggaaatgtaacataaggcaaagaatattcaggacttgcgtgatgtatggaaagatgccaaaaaaaaaaagacatttacaaaacaacatgacagtttcaaaactgaatcacagcttggaaccaaaaatccataattgcttaatttaa

SEQ ID NO: 15284 - DNA, 345 bp, Diabrotica virgifera
tttaatatttatctaaatataaaaattattttatatatttggtcctttcgtactaaaatatattaataaattaaagatagaaaccaacctggctcacaccggtttaaactcagatcatgtaaaattttaaaagttcgaacagacttaataatatagctgctacaccaattataaactttaatccaacatcgaggtcgcaatctttattatcgatttgaactctccaataaaattacgctgttatccctaaggtaatttattcttataatcaaaaaaattggatcaaaaaattattaattaatataataatataaaaaaagttaaaatttattttttaattcaccc

SEQ ID NO: 15285 - DNA, 346 bp, Diabrotica virgifera
tggtattctttttctaatatattataattatattatattaattcttatgatattctggaattaagcttaagatctgttggtgcaaccgggcataagtaacatttattcgaaacattttttagaatgattgatagatggcgctaataaatcgtatttttctaacaattctaaaatatatctaaaataaatgtaacttgatgaggaatccaaatctcgaataaaaaaatcagggttactatttgggattttaaagttaccctccaacccacgtccaggggctgtattatacatttttgtaatcagcatttcaaaagcttttaaatgaggtatcacatgatgtactttc

SEQ ID NO: 15286 - DNA, 343 bp, Diabrotica virgifera
aaaatggagtttgttaggccttattaggttttccttaattttaaaaacttttatacaaaaatagaactttgtgttacaaaattaaaagttatgtgatggcacaagaacgtgtttctttatattctgtagaaaacaagaatctacaggcccggtctgtttaatacctgctatacttagttaataatgaatattacacgtcataacacttgtataactacattacaaaccacctctgtcaaatgtcaaagaagttgttgattattatttgatcaacatatctgcaaaggtaactttatatcacatggtagggtagttgacaggtgcagttgtagtgtactaatat

SEQ ID NO: 15287 - DNA, 346 bp, Diabrotica virgifera
agcttagccaatttcaacttcccattggacgtaagaaattctgtgtcaaaatattctgtattgaatccctgggccaaagaaataacccccagcaagaatatcgtaaaaacacttttgttaatcatattgttcgattataagaataaattaccttagggataacagcgtaattttattggagagttcaaatcgataataaagattgcgacctcgatgttggattaaagtttataattggtgtagcagctatattattaagtctgttcgacttttaaaattttacatgatctgagtttaaaccggtgtgagccaggttggtttctatattaataaattaaagatagaa

SEQ ID NO: 15288 - DNA, 345 bp, Diabrotica virgifera
  SmartBlast Evalue=6E-45; Info=Roadblock n=2 Tax=Tribolium castaneum RepID=D6WQQ5_TRICA
gcacatcatctcccatcaatctgtaggattctgcacaactataagtataaactccttatccggagctaccattatttcatgtttctttgatctaattcttaaaaatgtaaggtcattggatggatccaaatctctaacaacacttctagctttatctgctaaagaacttattaatccagcatattgcaccgttgttgtattatccaaagtagtttttattggaactccttctgagttcactacaatggttccaacaattcccttgtgggattggatcctcttcatggtctcttctacttcttgagccatttttctttttgagtattttaattttctcctcaaaac

SEQ ID NO: 15289 - DNA, 346 bp, Diabrotica virgifera
ttatgctgtctgaagtgaaaacgtgttcttagacgtattttaacgtcattaatcttacgtatttaaaatcacctacaagacgtttatacgacgtaatctttaaacacgtgtatatattcaaccaaaactgacgtttcctcgtcgttcttgacgtcacttggttgcctggagaattttcaagtttcaataaaagttggcgtcgatgtaaaaaaaatttgtttaaaaaaatatgtaaaaataaataattgtaataataaataatacctacttgtttgaaatgcacgtgcgctcaacgcttgagattggggactccctcgaggctagttcagctgaaatccacgagagg

SEQ ID NO: 15290 - DNA, 345 bp, Diabrotica virgifera
cattcgccactatgtaaaccaatttttattactaatagggagagcgaaatttattgcagtagaattttaatagtttcggatttaagcatgaagaggggaagaaaggaggcggttttggttagtgtgggaatcaatacagttagtcgattttaacatcagaacctcgacggacgtgttatttgggataatcgaaaaagacgcaacttaaagagacgctttaagacgggtattatgacaagccggttataatattgattagacgcaattatttccaaatacatttctttttgtaagaacaagtacattttggtcgcaattacacaaacacagactgttaaacatcac

SEQ ID NO: 15291 - DNA, 344 bp, Diabrotica virgifera
gcagatttgtagtcaggtttaccaattaacgtttaataaaaaaactttattgttgaaaaatgtgtatatagagaagagtcactatatgtaaggtgccttgatgaaataatatgatgttccactagcagaccagttttacaattgtctcattttttcgcgttttgcgaaatttagttttagtttacttcgtactgtcatttttttggtagaaaatagttaatcataaaacatatccgcaaagatttgtggaaaaaatgtgagtcagatcaatgaagagattgccaattttaacgtgagaaatttaaataagataataacaaaaattaaatacgtaattaaataat

SEQ ID NO: 15292 - DNA, 345 bp, Diabrotica virgifera
cgatctgtttaagggataaaaatgacttggattactatgattacttttgtatttgagtaccggtaatcatatcgagaatcgtatttctcagtaggtagttattttgtataataattataataacgtttattctccatgaaagtatacaattaataataatacaatactatacttacatcacaatacaataatttaatattacatttatttaattgttctgtactttgttcaaggtaaataaacaatagttcccattaaaacaatgaagttgagcatgggccaaattttttttcatattgttcatttatattgagcttacattaaatttttatttaagcgagtata

SEQ ID NO: 15293 - DNA, 345 bp, Diabrotica virgifera
atttaatattaataatataaaaatatttaattataaatatattgttaataaataaatttaatttatttcttaaaaaattagatatatttaaaaacgaataacatttcattacaaaaaaattatttaaaatatttattttacaataaaaattttaattttttagctcttttaaattcgaaaataataaatatataattattaattaataatccctgatacacaaggtacaaaaataaatttttcttttataaaaataaaatattctctcacaatactaattaactatcattaaataaaatttttctttacttttactaaaaaatattttattattttaaaataaat

SEQ ID NO: 15294 - DNA, 344 bp, Diabrotica virgifera
  SmartBlast Evalue=1E-13; Info=Defensin n=1 Tax=Sitophilus zeamais RepID=B6RQP4_SITZE
caagaatagcagaacaaaaatgaagaatataatagttagcttttttgtgatctgtttgatagcttctgtgttcgcttctcctgcccgtatttcatttaaggatgtagatcagcatgttaaaaatcaacaaggacatggtagatttaaaagattctcatgtgatgtactgagcatcgaagccaaaggagtagcgttaaatgattcgccctgtgcccttcactgcctttctcttggaaaacgaggaggttggtgtaatgatcaaaaagtctgcaactgccgttgaaataatattttctaatataatatgtatttgtttttgttaaaaaaaattaataaaaaactta

SEQ ID NO: 15295 - DNA, 345 bp, Diabrotica virgifera
  SmartBlast Evalue=2E-21; Info="40S ribosomal protein S28, putative n=2 Tax=Neoptera RepID=E0VYW1_PEDHC"
ggtgcttttggtgcacgtgtttgttacaagtaatttccacaaattaactaaaaaacatggataaacccgtagttctcgcccgtgtaatcaaagttttgggaagaactggatcccagggacaatgtacccaagtaaaagttgaatttcttggggaacaaaaccgtcaaatcatcaggaacgttaagggacccgtaagagaaggagacatcctcaccctcctagaatctgaacgtgaagccagaaggttaagataatcttcaaaaggtgtgaacgagagtcttgacattgtttttttttattttcatgtaatataagtacattctttaaataaaatgtagtttttga

SEQ ID NO: 15296 - DNA, 343 bp, Diabrotica virgifera
cgtgaatctcaaaagaaaggagggacagaaaccagcaagaaaggcaactgttcaaaaatgatttactaaaaaatcgctagatatctcgccagacagaaaaaaacttgaaggcaaacaaaacaagaagagagtgcaaaaggagctaacacctgagtagtctgatgtaacagacactgatttgtcagatattatcgatgaagacaaattatatgatataaaattaagtttcattccaccaccagaaaaccagctgcacctagggacatgttgcatttgctggaaaacagaaaagaacgatatttaaagaattttataaaacattattcagtgcgcaccatttacc

SEQ ID NO: 15297 - DNA, 344 bp, Diabrotica virgifera
  SmartBlast Evalue=7E-17; Info="Sumo-1-activating enzyme E1a, putative n=1 Tax=Pediculus humanus corporis RepID=E0VT82_PEDHC"
gccctacatactttatcgattttgagtaacacatcagtttttacacatgtggcaacaataattgtgaaatctttaaagaaactgggatctttcgatgctggagaatctgaatctgcttttattgtaaccaaggggttcaacgcttgagctctttctaatacagcttcagctatcttatctccggtcctatttccagcaataagaaaattcttagcttgttccttctctgtgacaattccatcatctaatattgtcagagagttgattcctgataacaaaatattcttagcaatttcagatccaagagctcgtatgttaatcaaaagcacattagctgcacgtaa

SEQ ID NO: 15298 - DNA, 344 bp, Diabrotica virgifera
tcacttgccattttgtgacagatgtttcgctatttttagctcttcagacagaacttgcttgaaagacgaggtaaagagaatatcctttcatatatcagtagttattacacaaccatgcagtcattctccagattgtgaagatggtactaaagccaaaacaaaactaaatttcatacacatttcattaacttgacacgttcgttgcccatcttgaacaagcgccacactacgtacttaaattgttcatttagtaacacggtactaatgccgacactcgtgcgtcgttgataccttcgatgaaactgccgtgacgacactcgtgcgtcatgggcaccgaacatgtt

SEQ ID NO: 15299 - DNA, 340 bp, Diabrotica virgifera
gtatccaatttattactattattgttagtgtattatttatccaacttttttgttatattacaacaaatacatattaataaagaatagaaaatcatagaataaaatacaataaagagaatagaatagaaaatgggggaaccaaaaatatctattataaaaatcactgaaaaccattttagctactgaactttaatttagtactaaattatagagggtgttggattattttaattgcgtaaaacaccatatgtatcgacctttagtaggttttgcagcgtgacgctccctttatacaaggtgattaattgagaatgtccaatctctgtagttgaagatctag

SEQ ID NO: 15300 - DNA, 340 bp, Diabrotica virgifera
ttctctggcgaggagtgctggtatgggtagaggtgttgggttaataaaatcgaggaaggctgaacggttttcgtcggtcattaaagattccatgtctaaaaggttttttttcatgttgccaataaggggtgccaattctgacgttacttgtgcacgggacattccggataacattatggcagtgggcaatgccatttttttctattttacacaaaaacacaccaatcaaaaaaacttgaaccacatttgtgtgattttttgttgtgttcaacaacaaatacacacgtattcggcgattgtttcacatgagtatttacaaaaatatgattgaatattgttt

SEQ ID NO: 15301 - DNA, 343 bp, Diabrotica virgifera
tttccataaggtttgtgcggggtccttttggaaagtagtaagtaaaaattaatttaatctttaaataaaatacaaataacctgttgaaagtatatttatttcgttgaaatcatataatagaagtataacttcttacgtgcgtacggagtacacacacagtctttttttttggactggtttaatttcacctttttcctatgtgactatgtgtgttatcaccttcatttggctgaaatgatccgaatgataagatttattttatactagcagcaattacttgtatctctttctgtcatgagtttcctggttttgacgaaataatgattattaacaaaacactaag

SEQ ID NO: 15302 - DNA, 338 bp, Diabrotica virgifera
ataccattttatttgtagtaactccatctttaaatgaacattccaaatactctgtctttgtcctattaagttttaaaaattttcctccagagcttgtctctactgttccagttattaaatatataaaaaagatcaaggcaggttttgtttatatttgattcagagttggaccaccatctccatatagctatttcagcatccttatgcctcatcggtgaagctcagaagtctcaactctgaaggaaatacaaacaattctgccaatttaaggcaaaccatcgcaatgcaatgaacccacctctgagacgcaattcagtgacatctctcgtattacgagg

SEQ ID NO: 15303 - DNA, 342 bp, Diabrotica virgifera
cattagctacaactctgcttctgctaggtatagagacgtgatatatgccccattttttaaaattttctacaggctatatttttgctaagaatgttttttcgacaaaatacttactatttgagttatttgcgaaaaaccgtctaaaaacgtgggtattttgttgaaaaatgaacatattcactggcaaataactcgaaaagtattgacttagtgaaaaaactctgtagaacaaaagttacttaaaattagtcagtttatccatttccggacttactttggacgaatattttttcacccccaagaggaggtgaaaaccacccccagggaaaagcacatatcggc

SEQ ID NO: 15304 - DNA, 340 bp, Diabrotica virgifera
tttgtagagcccgattggttacattttagtagaagttattcctgccatcgtcctttacaatacctgataggtttcaaaaattcctgaattatatcacgttttttcacccacagcctggggtatacttacctaggcttctaaatgatgtttttccaatacccgtccacattgatggctagttcaatcgctatggctatgatcgcgcagcattcttccaaattcaaacagtttagtaggtggtgttgtcttgtacctctctaaaggcactgtgatcctctgtgtaacccctatttttttacattatctcgggcttgtttcataataactagatctacctgaa

SEQ ID NO: 15305 - DNA, 337 bp, Diabrotica virgifera
ttagataataataactaataaaatattgttttatttcagcatacgtcgtaaccactcctggtaagtactctatgcatatgcatacagggtgtttaattggaaaagtaacatacgttaactgtaggaaggggacacttaggtgatctcaaaaataccatacttaatgtgtctgacttcattaataatcaagatactgcctgattacttgttatccacgctgtatattcattttatatttggcacgcaaatattctttaaggtgtacaataaattaatttatttacaattgtaaaaaatccaggtccggattaaaaaatattggaaaatattccgaccc

SEQ ID NO: 15306 - DNA, 341 bp, Diabrotica virgifera
ctgtgctgaaattgtgacagtatcgtgaattattccaacatggaaccgttagcaataataattcctgtatattcagtagttttgttaatgctccttttacagattctatgggcgtttaaaatcaagaaaaaattgtacaaaatgatcgatgaaggttactactttttggagttggaaacaggctggggaaggaaaattttgaaacctattcctccaggcaacgtagatttatcatccggctctccgagactgatcagcaacatcataattcgccaatgatatcgccgaaaatgttaacgaattttggaaatcatggaaattgttaatacttaagtaaatac

SEQ ID NO: 15307 - DNA, 340 bp, Diabrotica virgifera
acttgcttacttccatttaatatatattcataatacaatcaaaattatccatattataacaatatacaactatatacatgtgtgtcatcatggttgattcaatattttcaattaagctattcctctgtccccatttccatttccgcgaccgccactatgtccaccatttccattgcttcctcctgagctttttcctcctgagctttttccgcctgagttgcctcgattagctccatgtggacctgcatctcttgaggcctctgtgaattggccttgtattaacagaactgctatcaagagaacgaacacaaacttcatgttgcttgtattgtgattcccc

SEQ ID NO: 15308 - DNA, 340 bp, Diabrotica virgifera
ggagagagcagtccagtttttgaaaagtaagaagtctgtgtaaagtggtgaagttggcggccgtgtaagcagaatcgtaatgaaaccaaatcgttgatcgagttgagaagttaaatctccttgtgttcgaagagatttctgtttctgtctggaacgagtagccggttggtatcaatttgcataagatatcgagaagagatttcgagagcgagtgctgttgtttgtttttgaagcagtttggacgagaaggatcgtcgcagcatccgaggagcatgtgtgggagaaacgaggactacacaatccaagagaagaagtaaagaaaaaaaggttagtcagatta

SEQ ID NO: 15309 - DNA, 337 bp, Diabrotica virgifera
catgttccagttatgaagaagagtagtttttggttttcgagatataatttttttgaaaagtcactttttttacccgcaagacctatgtaacccctaacatattctctttgattacagtagttcgtataatgttattcctttcgggaaagtacagactgtatttggtccttctgagcctgccattaaaagtttgctataatcagataggctaaaactcgatgcttgtaaattggactgaattcattaatatgcggtttgggcactacattttcctatctacagagaatgaaaaatatgtgagacaaagtttacgtttaccataatttatgcagggtgc

SEQ ID NO: 15310 - DNA, 338 bp, Diabrotica virgifera
tgaacactgttttaattgtataaacaatttagaaacaaagttagaaaaatgaaattcgcagttgcatttttagttttggcctttgttgcctgcacttacgctcaagaagaaaagccagcattaacaccagaacaagttattgatatcatccaggagaacgagcccaacttagcgtgcattaatttggcatgtagactttcctgtaggagccaaggattcaaagctggatactgcaatgctgaggcaaactgtatttgtacaccgcctgtagtagttgcttgagcatgtgtatcaaattttaggatattccaattgtttttatctctaggcctggtgat

SEQ ID NO: 15311 - DNA, 339 bp, Diabrotica virgifera
cacaattaggacgtcaaatcgatgagacaaatacacgtgattttcaacgtcatagaaacacgtcaattggtcatttttatgacgtgttatctacgttataaaaacgtcgtttggttgcttgatatttccacctttttctaggccgtcctaacggtcttctaccatctggactcttttgcaaaacacattgctaatcagtctgtcatcatcactccgcaccacgtggcctgcctatcttagtctattggcttttatgtatctcacgatgtttccctgcccgaaaagagtcatctaattcattgttgtatctgcttctccattcatttgtcacactgtccc

SEQ ID NO: 15312 - DNA, 340 bp, Diabrotica virgifera
tgtgtgcaagtacttggaggcgatacgagaaacgttcgtgggagagtaacggagaaatcttgcaactaacatatttcttaaataatttatattgtcaaattgacgtatatttctgtcattgaagaaaatgggatttcgcaaatgttgggttataatgttgctccacaaattgatatatgcaattattaaagtgaatttaattatttgtattttgcttgtagtactgcattataattaattttatttactacatacctacaatatttaccttttaataacataacctcaaccttacctttccttcttattcttttttgggctatggccttgacaattatcc

SEQ ID NO: 15313 - DNA, 340 bp, Diabrotica virgifera
gtaaaacgtgaaggcccttatgatccggcaggtgcgtttcataagcgtatgagtattgatacattttgtattcccgctcaaacttcggggtgttgactacagactgtatggctcgtccagcatgccatagcatggatgatatggtgcacgtccactttacaatgtagacaccttaaactccatggcctgacccaaatcatcgaaaggatagtcagattaaaatggagaagggcaggacacatactcagaatgacagatggagaggtaattggaatggagatttagaggagacaagagaagcgtcagcgaccacctaaaagatggactgaccatctaaaaa

SEQ ID NO: 15314 - DNA, 339 bp, Diabrotica virgifera
cccagaaactattaaacgacataaagagtaccgggaaactggctacgagcggtccagtcagtgtagagaacactggaaagaactgagggaggtctatgtccagcagtggacgcgattggctgattgatgaaggtatatgaaacataagaagctaagggtgataaaaaatatgagtataattttctccctacatcctattagcaatgagactagtaaataaggagaaacatataaaatcttattttgtcttctcggaagtgcaagtgaaaacttcaggtttaatagtttctcctacacaattttatgctgattctggacattcaaagaatataagcagag

SEQ ID NO: 15315 - DNA, 339 bp, Diabrotica virgifera
  SmartBlast Evalue=2E-43; Info=Glycogen debranching enzyme n=1 Tax=Harpegnathos saltator RepID=E2BPT9_9HYME
acatgagaaattggggaagagacacattcatcgccttgagaggactctttattttaacggggcgttatcaagaagctagggaacacattctaggttacgctgcttgtatgagacacggtctaatccccaatttgttagatggtggacgaaactcaagattcaattgcagagacgccatctggtggtggttatactgtattaaagaatacgtcaacgaagctcccgaaggaatcaaaattctttcagacaaggtttccaggatattccccacggacgacgccacgaatcaacctccaggagccgtagatcaacctttatatgacgttattcaagaaggac

SEQ ID NO: 15316 - DNA, 339 bp, Diabrotica virgifera
attgatataatagggcagtgtaaagaaaaactatagccgatacttgaatgtcatattttaaaagttcaaaagcattccaaaaatgagcttgaatgaattcatagttaccgtgcaacacaaaattagtaacgatttaaattatgctttggcaatgttttatgaacaccttgatcatattatcaaaaagaaaatcacacccaataattaaatacctacaatataatcacacatcacttaaaataataaaaataaaaatgctatgactgtgggtgcttaacataatgcatatttagatgttttcttcgtccccaatatccttctaaatcgaacggttgaaag

SEQ ID NO: 15317 - DNA, 335 bp, Diabrotica virgifera
aatgccttgctactatgtaaagtttcctctgagagccgtagcactttattcttgaccgttgtggggaagaactgtatactcaactgtggaactcaagaaggtcgccttaactcttggtctcagggcatatagatggagaggcagcgctgaaaaatctctttgaacttaccaaagccaaacttttcacagttgaccactgtgactgtgcagagaaacatactgcggtcggtcaagcgaaacgcagaacaggggccactgagaggttcatcaaagttgccctcccacgaaggtaattaaatccattcaccaaggcaaaaaatcagtacacacactct

SEQ ID NO: 15318 - DNA, 339 bp, Diabrotica virgifera
ctatgttcaaagattacggtgtttgaagtgctccctagtttttactgtctttacttataaaattagagtataaaatttgaggactttttgtgtaggtatctcaaaaagtgtgttttattaacatagctgttttttatatgacttagcttgagaaacattcgtaccaaatgtatattttttgaaaagctgaaaacgggaccatgcttttttagtacttatgttgcttaatttttaatttagattgcatagaaatccgtattgtttagtatattggcattgtaggataaaagttttatggccttataaatagtttattgatatttgtttgaatacgataac

SEQ ID NO: 15319 - DNA, 334 bp, Diabrotica virgifera
ggtctggaagcaaaaaggaaaatttttataatttgtataccacttcaatatagcatattgccattggcctcataatccattgattaaaataatttttagcttttatgtataaaatagacctttttctgcaaaagccacctgcctaatagcatcacgatcaatggcgtagctagggtggggcggggggggcggtccgccccgggtgtcacccctgaaggggtgacacccgagagacccgatcacaaaagaataaatcattaatttgtgactttactcacgtatcaatctaaagttcgatattattttgtgaacacacgaaaccacagtataaata

SEQ ID NO: 15320 - DNA, 339 bp, Diabrotica virgifera
tcgagaatactgtaatatttcattctgcgtttagatttttcaaaggtatttattagtttttcaggattcgaaaaaaattattgcatttggaaagagttcgaccgaaatttggcgcctgcgctctcaacgggattggagtattgtagatttttgaaattagtattgtgggagcttttgaatgaggtgtcacatgatgtactttcccatttgagaaaatcaagttgtgcctgtcacctgaggagggatcgcgtagggttcgaacgttgatgctatggtgtactatggttagtttgaagaatcgacctgtccgagcgttttgcttatattcttggaataaac

SEQ ID NO: 15321 - DNA, 338 bp, Diabrotica virgifera
  SmartBlast Evalue=4E-25; Info=UDP-N-acetylglucosamine pyrophosphorylase 1 n=2 Tax=Tribolium castaneum RepID=D2KLJ1_ TRICA
tttttcttgttgctatattttgtatccgtcgtattctttctgcttgtatttgaaacaatgtcttacctgagggcaagtcaaggggaaacatacctttaggataagtaactcccaatctagatccttgacctccagccaacaggataactccaacatgtcctttagatatttcgtttaagccttgcataaaatattcatctaacactccaggatctaacttaacttcagcttcaaactgatttggtggaacaggttccatgtaatcgtccagcttttgaatcccttcctgcatgtaactttgtgccctatagaaaacatcattcacttgttcaaaattt

SEQ ID NO: 15322 - DNA, 338 bp, Diabrotica virgifera
gatatcttcgtctatatatttgttaaacctgcccatggttttcactttggcaagttataaaacattaattgtgattaatgtcactgaatgtctatttaattttaaatttacgtaacaacgaaggacatctgccgcgctacttgacgacggataattatcaaaaaaattatcagtagtaactgcataagagctctaaaattattgaatttttcccgagtgacactttgacagttttaatttcacgagccgaaggcgagtgaaattatgtcaaagggtcacgagggcaaaaattactatattaattttagagttcgagtgcaatttgttgcgattatttc

SEQ ID NO: 15323 - DNA, 329 bp, Diabrotica virgifera
tcggaaggttttattggtggctccctctaaacggctatatgtaaaactaaaaagacgggccacttataacatttgattgtattcgctccgagcgttattaaactgtcaaagcaaaatcgaccgacctgctcatagtggcggttgcttgaaatgcttgtaaggacgatttagtgaatgtttaaatgggatatttaaaaaaaagccatatcacgctatttgttgtgttgttcactgtaagaatacatgaagaaattgtgatgtgaaatacctttattttcctcgttcccaaaaaacattaagattaaagaattaaattgattaatgatatt

SEQ ID NO: 15324 - DNA, 330 bp, Diabrotica virgifera
aatctgacaggctattgagaaattcacaccgagaatgcagtacagctaagataaggcaatacatttctaaatggggaataaacacacagggttgtcggtcttcaccagttcttgattgctctctcaagagcgttgcacaggaactgtggcaacactgaatgtgcattcgtatcttaaccgtactgcaatctcccagtgtgaatttcacgttagacaacagtaaataattatacgttctaagtactagaaagatacatcacacagtgagaataattcagtatcttctagcggcgactggtttctttatcacaaaatgcaccagcaagttca

SEQ ID NO: 15325 - DNA, 338 bp, Diabrotica virgifera
  SmartBlast Evalue=5E-57; Info=Dynein heavy chain n=1 Tax= Tribolium castaneum RepID=D6WRL4_TRICA
cgactttctcccttgatgcagccgatgctaatgctatagaggaagtgaatttggcatacgaaaatgtgaaagaagtagattgtctagatatctcaaaggagggacaagatgcttgggatgccgctgtacaaagatatgaagaacgcattgacagagtcgaaaccagaatcacagctcatcttcgtgatcaactcggtactgctaagaatgccaacgagatgttcagaatcttctctcgtttcaatgctctcttcgttagacctcacatcagaggagctattagggaataccagactcatcttatacaaagggtaaaagatgacatcgaagctcttcat

SEQ ID NO: 15326 - DNA, 338 bp, Diabrotica virgifera
tcggtatcctaatttatgcacgtaactttaaaagtcatattaagtaagtgaataataattgcaattaatataataacattcttcttcttttagtggctattcgtttcgaatattggcgatcattctggctgtaattattttattaactgatgctttaaatagatcagttgttattgtggagaaccaacatggattacaacattacaatacattaaaggtcagtatcgatcatgaacagaattgaagcattggaaatgtggattcatagacggatgctgaagataccctggacagcaagaaaaactaattaagaagtactaaggaaggtcagcaaagat

SEQ ID NO: 15327 - DNA, 334 bp, Diabrotica virgifera
aggattaaacataggttccgctcctccaggggtccgttaaaaaccatttgtggcattctcatacccattgggggcctcataggacctcgcatcatgggtatcattccagcgggcattcccatgttgccacccatagggcctggtccatttcccatatgactacccatactcattggtccaataggaccgtcttgagacatgggcccttccatgtgtcccatatgtggaggcatgggacctccttgcatagggccattgttaggaccacaagaggagaaatattgcatattctgtggttgcattttttgcgtccatcatattcataggagttgtg

SEQ ID NO: 15328 - DNA, 335 bp, Diabrotica virgifera
tttaaggttgatctgaacccccccaaaaataaactacacattcaaaaaatttgaaaaaaatttgagaaggtatatgtgatcactagaagtattttgacaaattttgagcaaacttgatgtttccgttttagaaaaaactcaaaaaatactccttttttccaagtatatagcgggaaaaccaaacatacaattttgttaattttcttacaggataaagatataatcctaagaaatacttatgaattttttgaaaatttttgatcttccagttttgccacaataggaaaaaataatatgttttggcttataacaaagctaccggtaagaaatcggac

SEQ ID NO: 15329 - DNA, 337 bp, Diabrotica virgifera
  SmartBlast Evalue=1E-16; Info=MCM7 n=1 Tax=Bombyx mori RepID= Q60GE6_BOMMO
cgaatgtaggtaacagatcaaacacaatgtcgccaagaattgtactgtatcttcttgtattcgcttgaatagccctggcgagatcatcgtcaaaatcgttcacatcatccagttctatccacatagcaacttgttccctatgtgctaattttgttaattgatttgaatacttaaagattttgacaccagaaacatcttgtacacaatattccatcaaaaacgtcttgagttgttctttatccttatcataatccctccgtgccattttaaacaactgattttatagatattggtgtaatttagtttagattcaagttaaaaagttaaaactacaaaa

SEQ ID NO: 15330 - DNA, 335 bp, Diabrotica virgifera
ccgggcgtaaggaaatgggtgagtcccaaagtttcacaagaaaaaagcgaatatttcgcgaaatgaatgacagatcgaaaaactaaaaaatatgtgctcaatattttttcaaaaatctatcgaatgataccaaacacgacttcccacggagaggggtggggggtaaatttaatattttaaatacgaatcccgcgatatttcgcgaaatgaacatcagatcgaaaaactgtaaaatacacttattcaatatttttgaaaaatctatcgaatggcaccaaacacgaccccacggaggtggggtgggggttactttaaaatcttaaataggaaacctc

SEQ ID NO: 15331 - DNA, 336 bp, Diabrotica virgifera
agaacatcgatacggttatcacagtatcttttaactatagttattctgttgccaaaaaattatgtttaaggaattattccttctgggtgtaacacttctgactctgagtatatatttcttccttatcttaatattttgagacacataactcctgttaaaaccaccttaatatgtagttctgatatgaagtgaccaataatgcagattgcagtaatcgaatatgatttaatatcgatacaacatatcataccataaaataagaaacaaaagaatacgatctatccaaccactttttcactatcatttaatagtaaatgttatctttacatatgcaat

SEQ ID NO: 15332 - DNA, 332 bp, Diabrotica virgifera
ccaaattctgcgccactggcggaattgctgttttagttcaatttttggattcgccaatactttctatggaaatggtatattcttcattcgtagcgatggagtcattggttttcgagatctttgaagttaaaaatgaaaccacagggttattttgattaatgtattgtgtagcttcatttttaatttcaaatatctcgaaactaatcattttgtcgttgcgaatgaagagtatattatttacataaaagtacactaaaatagcaagtttcgtcagtggcgtggaatttgggaagggtcaaccagactttatcccctgtcgtacgcctctgtta

SEQ ID NO: 15333 - DNA, 333 bp, Diabrotica virgifera
  SmartBlast Evalue=6E-21; Info=Endonuclease-reverse transcriptase n=1 Tax=Bombyx mori RepID=D7F170_BOMMO
gtggcatctgtgaaaatggtatttggaggaggaggtacaactacgaggtttaccacagatttaaacatatatttggtggtaaagacgtagtatctgttataagaataggaagactaagatgggcaggacatctagccagatcacagcataacaaccctcctagaagaatccttatgccacaacctatgggaagtagaaataggagtaggctaaaacttagatggaaggatggtgtagatgaggatgggtgcaaaataggcgcagcaaactggcaacggttggcaatggataggactgactggcgtaatagacttgggaaggtcgaggctcttt

SEQ ID NO: 15334 - DNA, 333 bp, Diabrotica virgifera
  SmartBlast Evalue=3E-14; Info=Endonuclease-reverse transcriptase n=1 Tax=Bombyx mori RepID=D7F170_BOMMO
caacaaaaaaacaccaagagttgttgttagtttgggagaggaaaatactgcgcaaaatcttcggtgggaaaaacttaaatggacaatgggtaagaagaacaaataaggaactaactgagctctatcaagatcctaacatactagcagtaattaaggcgcaaagacttagatggttgggccatgtgcagaggatgattccatctagaattcccagaatggtactatctagtgcattggcagggaaaaggcgaagaggaagaccgaggtcacgatggagtaacgggagttagagaagatatgagaagacttaacgtaacgaactgggaaagaaaa

SEQ ID NO: 15335 - DNA, 336 bp, Diabrotica virgifera
ttatctcacagtaatagtttttggcactaaaaatgtttcataaaaacctggtcgtctattttatatggattataataattacaccaataattggtatcacgtaactggcatcgctctagatttaaatcatgtctttttgtctgattctgccatatcattaagttgatttagtaataggtagcagatttacagaatcctattttttttttcaaaatacatataataaacattaaacacaagcaaaaagttaggttaataatattaatatggattaactgacagagcttcagtcgggtcgcccacgttttctcaactgtcatcaatacgactaacttc

SEQ ID NO: 15336 - DNA, 338 bp, Diabrotica virgifera
tgagtaatatgtgtattttgtaaatactaatatattttctaaacactagcctgaatgcaccattaacattaattttgagaattgctgggtataatctacgtatataaataaagtgcttaaacagttttgtcaattttcatatagttcattaaccaactccactacttcctctttacttcttggtttagataataatgaaatcttcgtttattttacaaaaataaattaacaattcgaaaaatttttgaaactctaaaaaatttctctatcatcattctctttgccttattaattgcatttctccacaccattctatcttgggccatatcaatattaat

SEQ ID NO: 15337 - DNA, 334 bp, Diabrotica virgifera
tgtggaaactgcaaaaccaaaatctgaacccctcgtagaactagatataatttctaaccctgttgcttcagaggtacaggacgaaaagtctgaacctgaattaaagtctgaacccactaacattgcttctgagatctcagaaaataagactgaacccattgaaagtatcagtagtcttccttcgcaagaaccggttatttctattttgccaaagacagttgaattagatgcagttaataatgtttcagaagacaaagaaacgttggaaattaaagatgatttagttttacctgctttaccttgtgaaaatgaggaacaaactgcaatttctact

SEQ ID NO: 15338 - DNA, 332 bp, Diabrotica virgifera
  SmartBlast Evalue=1E-20; Info="Solute carrier family 2, facilitated glucose transporter member 8 n=1 Tax=Zea mays RepID= B6U615_MAIZE"
acttacaaacgttaatagatgttagcagtttcgcgatggttccagtcattgctctcttggtgtacattatcttcttcagtatcggtctccaaggtattcctatcatcattttaagcgaggtgtttaacgctgatattaaatcaattgctctgggtttgctgagatttactttgctattattgccactgccacgtcaaagttctttcaagttaccagagatcactacgggatgcatgtaccgtttatttccttctctaccatttgtgccattgctattgttttgatattcattatggttcctgaaacgaaaggaaagaccttggaggagatcc

SEQ ID NO: 15339 - DNA, 334 bp, Diabrotica virgifera
cgctcatccctctcggcggccctgattgtattaattattatagtaaatgcattattattaaactgcttttatgtctttcattatttgtcagacttggttttactactttaaagtgataattcaagataaaaaattttaaaaaattctttagttgtcatattaacaagaatatatgcaaaaatatgtgtgaagtatatttaaaaagaagtgatgttaaagaagtaccattacttttagtataggaatgtatgtaaaacgcgtttttgtataaattagataataccaaatttgctaaaacaattaaatggcggcgttacgaattgacggcgttacc

SEQ ID NO: 15340 - DNA, 331 bp, Diabrotica virgifera
actatattttgacccccctctaaactgctttatttgcagaattagaaagaagaatgcaaagtatagaacttattcaattttcaaacgattttttggcgtatatgtcgtgctggtgacgtcgtccatctgggcgtgatgacttaatcgactatttttgaagttatacttctttaggcgcgatttcattgagggtgaattttattgatctgcgcgcatgcgcacacaggcagtatggagttcgttactaaatgttttaatttatgtatttatcagtccagaaaaggtgtggaaagaatatattagtgtttttaaatatattttttctacaaac

SEQ ID NO: 15341 - DNA, 333 bp, Diabrotica virgifera
taataatattagatacagtgtagaaaagaaatatagctttttaagctttgtctaggtaattttgtctattgatctcaggataaacacgatcattttctctaatctcgaaaaaaattattgcaaggaaaatgaattcctgctgaactcttcagccgaagaaatatgctttaaggattgacaactctacttgtcataataagtaaataaggatatggtattaagtagatcaagctgaagagataaattgaggaaaaactggctatagctatgactactcaacatacagttgagtccctgaatctttacccgtgcgtcatcatttggagcatacga

SEQ ID NO: 15342 - DNA, 333 bp, Diabrotica virgifera
ggaccgcgcggataggccgtaagcggaaaccgcttccactgtgttcgtgtacttacggcacgttcacatgacaagcgcttaacgcgcgattacaactttatacattttattgacgccgttctcatgctaacgtgccctaaagcctttgagaagtcggtcaaagtaggtataataacgttactagatcacaatctgataataataaatatcgacataacggcacagttatacaaggtgtttttcgacgagtttacactatctatatatcggaaaggacatacaggatatttgtgataatttgttatgaggattacaagttatgatgaacttaaa

SEQ ID NO: 15343 - DNA, 334 bp, Diabrotica virgifera
  SmartBlast Evalue=6E-24; Info=Drosomycin n=8 Tax=melanogaster subgroup RepID=DMYC_DROME
agcaaccagtagaccacagatctgcaaaagaaaattttcaaaatgaaaggttacttcatcttcgccgttttgttgatcctcaccatcggtaccgaactcgctttcggtgactgcctttccggaagatatggaggcccatgtgcagtatgggacaacgaaacctgccgcagagtgtgcaaagaagaaggacgagtaagtggccattgcagcgctagtctgaagtgttggtgtgaggggtgttagccttacagaagtactactattttaatcaaaatgacgatgttcgatatttttggtaaaagttttgtatttttttaatataagtttttttagc

SEQ ID NO: 15344 - DNA, 332 bp, Diabrotica virgifera
taatgatttcatttgtgacctgtatttttgttacaccctgtagtgtaaaacacgtgttgaatgaatgaaaacaaaaatttatggcaattgtagctcaacgaaaatactctatacacctccaatatcattaattatatctcacgattatgaaatatataaaagacagttatgaaatatgaggattaaaaataaatctgaaaaagactgagtacatctatattggagaataacaaagacacttcaactaaatagagagatattgcagagtcacttttgaacttgtatcacagcacgcgttattttgacagtagagcatgcgcagtaatattttg

SEQ ID NO: 15345 - DNA, 332 bp, Diabrotica virgifera
aagggtttcaaacttcttcttgaaaattgatgtttttcgttgtgaagcgtagaaaagatactgcggagttgtagcctttacgaaatacataactgaaagtcgaaaaattaccatgataataaaaaatgttctcgctatactgtactaggttcgttcatatggatgttaaattaacacttgtaacacagtaagtcgaaactaaacacttcttttctgagaaacgcagtgattaaatacattcaatgagtatgtattatatttttatcgccttttgtagtataactaaatggaaaatggagtacatataataaatagtgtacaatatagcgaag

SEQ ID NO: 15346 - DNA, 332 bp, Diabrotica virgifera
actttatatcgtgaaataataatgtgttatttagtgatgaaccattgacatgtatcgagtcgctattttcttcttgctgtcaggaattgcggtattcgtattcggaaatactgataatacagtaaactgcaagcctgacaccataaagataccatacacagtctggatcggcgatggaattaactatgggtcaacaatagaagtgtatgcagaaccaaattcaacgttttaccaaatcatgttgatagcggccaaacaaaataggttttttaagtttaaggcaacaaatacaacgtttggccattacattactaaaatagctggagttcgtg

SEQ ID NO: 15347 - DNA, 331 bp, Diabrotica virgifera
gactttttcagattcttgtttaagttcctttagcatatcttaaatgacttaaaaatctgccatcaattttaattccacgttgttcccaatttaacttcttgaacatctggagcagacatctcctaattcaagagtaaataattttggagagatagtgtctccctgactaactcctctctccgttcttattttgtttgttgttagaccttctgatacatttatttgcatagtttcattgtcgtatatgtattttagaagtacatattctatatctggaatcaatccttgcgttattcattccttctaatacggcccagagttctatggaatc

SEQ ID NO: 15348 - DNA, 331 bp, Diabrotica virgifera
acatattgttttttatgtcttcatataatatatctacaaaatactctatggcctttacgtagggaatttgtactcagtacttcatacaattttgaaaagtaatttgattcattatttgtatagaatagaattaattatcacatataggcaaattttggtatcgaattgaaaacctcttatttggttttgacaaattataggaataaacaaaaactgtacaatttgctaaaagatgtgattagttagcgaaagagaccttctgctcttaaccataatatatgagttgttaattataaaacacattgtgttcgaatgtatctttatgtttgaa

SEQ ID NO: 15349 - DNA, 331 bp, Diabrotica virgifera
cgggcgggtatttctttcgattaattaattttcattgaccatggagtgcattccagttaaagactattcgtatcttagctaaagccccacggtacgtgtcaaaccaaacccttcatgcagacctaaacattcctttcatcaatgatgtgattgctgaccactccagaagatacatgaatcgcagcgcagaccatccaaaccatctcatagacgaattattcaaccctccactgattgacagactcctaaaaaagacttcggccagaagacctagctgctaggtaaatcacagagagtcgtcaatggacgacacctgccacaagccaagaac

SEQ ID NO: 15350 - DNA, 327 bp, Diabrotica virgifera
gttgagtttgtccatcataattgaatatgacacggtgacccctctggcgcctagactagtacgtacctgttgcttttaaaaactattgaaaaagtcactacaataattataaacttgctttttgtctctgtcctcacaacaataaaaactaatatacacaacatttgtttatgcataatatccatttgaacaaatattgacagatgattttaacacccaatcagatcccgtataacgtttgagcgactaaaaccatactgtcggtgtgcgcatgcgcccggcaaaataaaattcgccctcgtgcctaaagaagtataacttcaaaaa

SEQ ID NO: 15351 - DNA, 331 bp, Diabrotica virgifera
atgtagatttcacggagactgatttagacaaaatattacaagacaaatgtaaggttgaagaaaatcctcaaaataatggaatggatgagaatataaatgaagtgtgcaatggaaagtcagaagataaattgccagtagataatgaagatgatggtttacaacagttatctttaaatgaaattggcaacaatgatgaaggcactatagtaatatccgatgaaaatgaaactaaaaaagatgttgaaaatgatgggaaacataataatgcagttgatacagataacaaatgtgaagaagaaatcgtatatgaagaacacgtatttgagagaac

SEQ ID NO: 15352 - DNA, 330 bp, Diabrotica virgifera
cttggatttgtgaatcatgttactatatatatactgtcaaatcaaacctttgtatttaatatccttgattaatctaccttaatctcatgtcctagatatagtctatagtcatgttgaatatatttccttctttcttcctttcttcttctacttacactatgttcaagtcaaccgttcatcttctttaacatttatttactaactgcctgtcgaaatatgtgtctgcgttgagaattccacaccagatctaaagtaaaatattttcctccaaccaaattgacatatgtggtataaaagagattccactatagattctgtaaccagcagtat

SEQ ID NO: 15353 - DNA, 327 bp, Diabrotica virgifera
gtagcgaataacgtggctttgtagacaaatctgtgacacaaagaggtgtcttttgtcgttcatcgtcttttatgaagactttgaaatttacattttcgcgtccgctacggaaaagatttcttctgtataccagagaaatcttttcgtttaattcatatagatgtcgtaccaagtgtactgaagtctggttattttattattaccagaaaggccaaaagcattttcttacacctcgaccatccacctagatgttcctgacgagagcttgacatgagctcgaaacacgtcgtgtagaatatcggtggtggtcgaagtgaaataaaatgc

SEQ ID NO: 15354 - DNA, 330 bp, Diabrotica virgifera
  SmartBlast Evalue=1E-10; Info="CG5445, isoform A n=5 Tax= melanogaster subgroup RepID=Q9VX56_DROME"
catttgcatttggatataatgaaaattttggtaaaacattgtaacaagtggaggattgtatactaaatataaattaatattattggccgattcatcttcaatttctaaatatggacatagacaatggaccagaggtgcctgtaccagtcagtggtacaggtgtggatattgaacagtccttcttgcaacagttcagttgtatggggacaacagacaaagatgaattgattcaacaactgcaaaagcttgttggcagccaacttaattactccacagctgcttttttcttggatatgaacaactggaatttacaagcagcaatttgctcat

SEQ ID NO: 15355 - DNA, 325 bp, Diabrotica virgifera
gatctaaaacttcccataacacttcttttggactctatagtttaacatagacgtgatcaaattgataaattttaaattttccacctaatttttgcgatttacaagtttgcaacttttacaagaagaagactgaaagtctacaacaattttcatagtcttcacaatggtaagaggtatgtgctgtaaaaatttcagaaaaaaaatattaaaatggaacagagttgtagcgagttaaaccgtgagttcatttttttttcatttttaggttaaaattccgattttgacaaatttgattttttaataaaaaattaagtaatcgtgtggg

SEQ ID NO: 15356 - DNA, 329 bp, Diabrotica virgifera
  SmartBlast Evalue=2E-27; Info=Cacophony A n=1 Tax=Tribolium castaneum RepID=C9D7C3_TRICA
gaagaacgaacgactgaagaagagaaattacacataatggaagcacgacgaagagctgccagaaaaaagaagcttaaaagtatgggaaagagtaaaagcacagacactgaagaggaacaggaagaagacgagatgggcgatgatgcaggttacggtaaatcctcctacctgaagtctagagtgcaaggccagagtggctgtgccaggttttggagagcagaaaaacgatttagattctgcattcgacacgtcataaaaacgcagtggttttactggtccgtcatcgtgttggtactgttcaacacaatctgtgtggctgtggagtatca

SEQ ID NO: 15357 - DNA, 326 bp, Diabrotica virgifera
cttgtcatggaaatagtgcgaaattccatgactagtattgcgcgtaatctcgcacaataccgcagaatttcgcatatccgcaggaatttggagctaatgtgtagaaattccgaatggtaatgtgcggaattccgaatttttttcgtttcaatccattgcgatggttcaaaaacgatatggtccaaattaaaaggacatgatttgattcttgtcatggaaatgtgcgaaattccatgatagtattgcgcgtaatctcgcacatccgcagaatttcgcatatccgcagaatttggagctaatgtgtgaaattccgaatggtaatgtgc

SEQ ID NO: 15358 - DNA, 326 bp, Diabrotica virgifera
  SmartBlast Evalue=8E-16; Info="Solute carrier family 2, facilitated glucose transporter member 8 n=1 Tax=Zea mays RepID= B6U615_MAIZE"
attactggaaatactgcacaaacgagagaagcgaccatcacgctacaatataagcctaagacattgatgatgaattggcctaaaaagcctgaccaaacgattgcgttgccccaggtacctcttacttgtggactagatatttcagcaataaaaactaccaggcaagtatatgcaatacaatcaccaattccagtgatcaatctggctaaataaaatagccagatatttctagagaaagctgcaagaacatacgcagtaacataaggaaatgctgttaacagtagcaagcgttttcttccaatctgattgactatcaacgacaagaa

SEQ ID NO: 15359 - DNA, 329 bp, Diabrotica virgifera
atattgacaagggtggggggggtcatgatttgcaattgcgacgtcgacatcaggggggggggggggtttcaactgtaaactacgcgacgctttacgacaaaggagaggaagggtattaaaaagtccaaattttttacaacatagcttatggatgttcccttttctattttcgattacgaaaaatcataatatttgttaatgtaacattataaaaaagaacttagtcgatattgaacaatgcatcctaattttacagtggtgtctccaatacaaatcggtcacattgcagataatataaaataaaagtttattgacattgtattgaaaag

SEQ ID NO: 15360 - DNA, 326 bp, Diabrotica virgifera
tgcgcaccgtccgctaattggtgacccctggcctagatattcaagttttctttgtttaattgtactcacgatttctttctctttttcgatactgtgtcgattcacatttcgaatgcttctagtttttttatgagctctatgtcagcgtccaggtctccacacatattcgctgtgtgcaagtacttggaggggatacgagaaacgatcgtgcgcgagtagtggagaaatcttacaactttcttaacatatttcttaaatataattcatattttcaattgaaactgtcaaattgacgtatatttcatacctactgtcattgaagaaaa

SEQ ID NO: 15361 - DNA, 326 bp, Diabrotica virgifera
tattgtataataatagtgagctttcttaaaatgaagtgaactcttgtgatgggatggacatgttttaattgtaatacttacagttttccagtcgtttaattgatcattttcattttgttcccaaaataaacagttacaaccacataaccccatttgtaataggtaaacaaattcgttatttatatgttatttatgcgacttttgctgttgaatccaattttagcacatttaaaatatattaaatattgttagcaaatcgattttgttcactaatatctttagaaaacggcattataagcagaaaaaacaaacttttctatatgtaa

SEQ ID NO: 15362 - DNA, 326 bp, Diabrotica virgifera
gatgcatatatgttgatatgttggaatgtaaagcaaaattaaattttgaatccaggattaaaaagagaactaaatttgtatacattttaacaaatcctaagtaatgtatttcaaatttgttagttctctataattaatatctttactttcatctattatagtaaaaataaaaaaatctcatcctgtaactgtatttaagtatatttaaaatggattatgaagatatgaccgatgaagaactggtcgtccagtacataaatgactgtgcttatgactcaaattcttctttaaatgttcaaactttcttcaaaattcaggagatactg

SEQ ID NO: 15363 - DNA, 326 bp, Diabrotica virgifera
gagtcaataactctagtgaatatttctgtagtagagtcgatcaatgtcggttcagtgacaaagtctgttgtagcgtcaccatcttctatggttgttactgtaacgtgcgattgacgactcgttgatgttacggtacttgtaggagataaaatatttttaaatatgtccgtagccgcgttgattgaattgttagcagttgttttaatagttgaaatggtttgatcaattatgttactagtacctggagtaggtactacctgattaataagattggtaggcggttttactatagtcccaccagtatttaaaatattgtgtaaggtact

SEQ ID NO: 15364 - DNA, 325 bp, Diabrotica virgifera
cgagaaaatattttcacccagtatttcccaatttttgtaaaatggaggggatgtagaattgtaaactttttcttatataataatagacaatttcaactacctattcccaaattttcatccttcctttatttttttggaggttttcgtaaaattttgtgttccctgatcgggctatttggtcaatttataaatctaggaacttgacaagtagaccagtaaggatctgtttttaggtggatgtgacaggtggcactcagacccctgcggacaaagccaggtgacaacttcgccaataataattgaattatgctccctctcaaatatg

SEQ ID NO: 15365 - DNA, 324 bp, Diabrotica virgifera
aaatgttgttgctgatggtggtgttgcgtatatttttgtttagatttaggttgtattgtaatgtaacaaaatgggtatagaattagatatcaaacgtaaagtattgcaataaaaatagtatcatcgtttcgacatataactcaaaattgagcttcaatatgggaaatatacagttatttttttatctaatgatgttaatcacaagcagcaatattattagctatggacgaggacatatccgaaaatatgtcggagccagagattgaagaggacgagtcacgatcaaaaaggtttagattaccgagaaaagcaactatcgaatac

SEQ ID NO: 15366 - DNA, 326 bp, Diabrotica virgifera
tgatcatgacgtcataaagttaaaaatgttcaaggtctggatctcgatatttgacccttcgcttcgttatcgatcattcgcatctgtacactaaacagatacgaagcgaatacgttcgataacgaagcgaagtgtcaaaaatcgaggtcctgtgccattaattcattcggtttgatattcgtttagttgttagtcattttatggtgtatctcagttttataaatatttagatagttgctgtgaattatatatttcgtaatatttgagtgtttttgtgaagacaatttttttttaaaacgaccggagagggtatttctagaagaagg

SEQ ID NO: 15367 - DNA, 325 bp, Diabrotica virgifera
gttccgatggtaggttacggaatcaattaaaaataagtgtaaacaatgaacaataatatatttatttgtgtcgataaaaaacgtgttttgcttatatctcgaaagggtgtgttgttaacgtaccacgtctatcccgacgcccgctggggtgtgactgccgacgggaggttgtaaatcgaccagtggttgtgtatcgactgcctgtggctagaaaaaaaaaccacaaacgctaatatgtttgtgtttttacaatatggctagaaaaggcaataaattactacatctggcgttttaaaagttgaaaacctttctgtattttaagaag

SEQ ID NO: 15368 - DNA, 324 bp, Diabrotica virgifera
  SmartBlast Evalue=3E-11; Info=Encapsulation-relating protein n= 1 Tax=Diabrotica virgifera virgifera RepID=D7EYY4_DIAVI
gtagatgaccagaccttctacagtttgttgaacaaacttcaacatttggtacaagctggagtcatcaacagagtagtcttggatgttgtaagaaactgggatcagcaaggtgtacaaggtgttagtgacattgtctctctgcaaggactctctggttatggcaacttccaaggacaatcaagaggatattccccactcagagagatcttaaagaatggagtacaaggaaggagcttcaatcaacaatggttgaacaattccccagtccaatctttgcagaccatcttgcaacagatccagcaacaacgtggacttcaacaagaa

SEQ ID NO: 15369 - DNA, 322 bp, Diabrotica virgifera
  SmartBlast Evalue=9E-36; Info="Hemocyte protein-glutamine gamma- glutamyltransferase, putative n=1 Tax=Pediculus humanus corporis RepID=E0VU28_PEDHC"
ggaatgacgtttggatgtcacgtcctgatttgtcaccaggttatggtggttggcaagttattgatgctactccacaagaagtcagcgatagtgtaatgcgatgtggcccagcatctattgaagcggttagaaagggagaggttggatttttgtatgacacaccatttgtattttctgaagttaacgccgatgttgttcattttcaagaagacgaagaatctgattggggattcagtaccacatctgtcaaccagtatcatgttggaaggctgatagtaacaaagaaaccaggtcctactgacagtaacggagatagcgacgt

SEQ ID NO: 15370 - DNA, 323 bp, Diabrotica virgifera
  SmartBlast Evalue=3E-12; Info=Glucosyl/glucuronosyl transferase n=1 Tax=Culex quinquefasciatus RepID=B0W9Y5_CULQU
ccacagctctaaaataacttgttgttcttcgtatagatctttcattacaatttgattatattttccattcttgggtggattcttctcttcaaaaactgttagcatggtaacatcatgtcctgcttcggccaaccccttcattagttgacttcctaggaagtagtgactgggggcagccaaaggaaatacacctaaaatcttgtatgcatcagcatccttagtaactgttagaaaaccaaaaatcactgttatcaatcttagtttgtgcacaagcatttttaaaaattttaactgtcttgaaaactaactgcacatgagtatcg

SEQ ID NO: 15371 - DNA, 324 bp, Diabrotica virgifera
agtactagtacatagagtattagagggtattaggtacacttatattgtaaacaaaaatccagatgtaaatagtgcaatattaaatgatgtcgggagccaataggtattcacggcgtcagaacaacctacccaaaagagcccccgcagactgcagattttttatcggcagatagtttgccttcaaactaattttttggccaaatatcggccgacagtttaatcagtgtgagctagctaggacttgcgcacacacgacgattgtttatcggtcgatagttcaattgtctcctagttttgatatccaatacttgtgccgtgcgaata

SEQ ID NO: 15372 - DNA, 323 bp, Diabrotica virgifera
atatttttatttattttaaaataataaaatattttttagtaaaagtaaagaaaaattttatttaatgatagttaattagtattgtgagagaatattttatttttataaaagaaaatttatttttgtaccttgtgtatcagggattattaattaataattatatatttattattttcgaatttaaaagagctaaaaaataaaatttttattgtaaaataaatattttaaataatttttttgtaatgaaatgttattcgtttttaaatatatctaattttttaagaaataaattaaatttatttattaacaatatatttataatt

SEQ ID NO: 15373 - DNA, 323 bp, Diabrotica virgifera
ttgacgttacgaatttgtatagttacgagctgtcgctgttacgaactgtcgccgttacgagttgtccgttaccacttgtccggttacgaattgtcgcgttacgagatgtttggtcacggattcaaagaccatattaaagctaagattgcactatttttgtaacagcataaaactacgaaataataaaaattctccactgtttttcactaaaaccccttctattccccttatctaaactggattgaacatctcgaggtgggtcttcggccataggtgatgttggactagcgtcgtatctgttattcggtagtttatgtttgtcg

SEQ ID NO: 15374 - DNA, 321 bp, Diabrotica virgifera
atttggaattggtacgaattaagaacgtatatttcgtgagctgaaactttgtttttacccgattgatagactttactgatacaccattttttcggttttttattgagctacacttttgctaaggatatttttttcgattcaaatgtttgccttttgagttatttgcgaaaaatacgtctgaaaacgtagtttttttgtcgaaaaataaacattttcaatcgtcaaatagctcgaggagtgttgacttgcattaggaaactctatagaatagaagttgcttagaatcagtcaatctgtcttaccttaaacgtatattttttc

SEQ ID NO: 15375 - DNA, 322 bp, Diabrotica virgifera
aatggatggaataaattatggaaaatacaagatgacaaacaaatcaaaagcgttcagggcgaaaatatgacagatatcgctacaatatgtcaaaatatacctgggttcgaagaatgtgacgaacaggatgttaatgaatggctcgaattcgatcataatctacaaggacaaaaatttatgaggacgatgaaattgtcgatatcgtttctaatatggttgaagataacgccgagcatagcagcgacgatgaccatgataatgatgatccaaaggcttcacattccgatgcatttaactattggaaactgctatgaagttattc

SEQ ID NO: 15376 - DNA, 323 bp, Diabrotica virgifera
aaataataaaatattttttagtaaaagtaaagaaaattttatttaatgatagttaattagtattgtgagagaatattttatttttataaaagaaaaatttattttttgtaccttgtgtatcagggattattaattaataattatatatttattattttcgaatttaaaagagctaaaaaattaaaatttttattgtaaaataaatattttaaataatttttttgttaatgaaatagttattcgttttttaaattaatatctaattttttaagtaaataaattaaatttatttattaacaatatatttataattaaataatttt

SEQ ID NO: 15377 - DNA, 318 bp, Diabrotica virgifera
ccaacagaaacagacttagtcgtccatagaacaggtaattaaaatgaagatgatcgcagttctattcttgtgcatagtagttgcaataaatgcagttagcgagtgtccagactttcctggtgtaggagttatgaaagctggagaacagaaaccagtccaaggaacctgcaacattgccacctgccatgaagatggatctatttccatgttaacgtatgttttgaaaaaattacttcgttgtttttttatattaatttttaagcataagtttaaaatgctttgcagttaaaaaacacaatgttggttgttgccaatcag

SEQ ID NO: 15378 - DNA, 311 bp, Diabrotica virgifera
gccgggtcacaaaaaaaaatgatacacactgcgactttgaccctttaaaactaccctcatgcccaactctggtttccggctctggggattttacttagttatgtcatggtctacttattcccaaattttggtgcactatctcaatcacgaacgtcgcaaaaaacccttatatatttttatattcacccctacccccacccctttgtcggccacgcagcgttccatccctggagattttacttagtcacgtcatgacctactcattcccaaatttcggttgcaccatctcgatcatgagcgtcacaaaaaaa

SEQ ID NO: 15379 - DNA, 319 bp, Diabrotica virgifera
ccggatttccacgattttccggaattaaaagttgtattgacaataaaataatctattaacggtatctaagataacatatgccagtgaaagtatataaatgtagcaaacggaaaactaataaactatagtgttcaaattagcttgcaagttttttcaacgtttttcgttcacccaattggttttattagttattttgctgggccccctaatcctaatgttaaaaaatattattgtgctatgtttggcgtttttccacagctcaggtatgaaatacaacgagaacactaatagatgggaaggtaattggtttccacattca

SEQ ID NO: 15380 - DNA, 316 bp, Diabrotica virgifera
gctccaataaagataattctaatagtaaataagttgtaatatcgttcagtgttctgtgtcaaatatttaatttaaggtgtcatcatggctttttcagagagctgtattaagttttttgtatctggtgccaattttacctttgcactcggtggtcttgctttaatcgtcgtaggagtactatacaaactaaacataaatgattttactgaagctataccagaagaatacagctcaataggcgtagctcccatactgaccatgtagtaggctcaataatattgtcatcgcattctttggatgctgtggagccattaga

SEQ ID NO: 15381 - DNA, 317 bp, Diabrotica virgifera
aaggggtttttaacaagaacactttcagattacatcccagatcgtttttggaatatcaattccattaactatttttaatgtgaaataaggcacaattttactaaacaaatgattttattaacgtttcgacgtccaaatcggatgccgttggagaaaagccacaagaaaatagcttcagaacaacatcaattctatcttcaggtgctgctacaagcttaaagccacatgatatatgacatgctgtatgatatgtgacatgccataaagctaatgcttaaagccactaaaaatgtaagattaaaatatatgtttataac

SEQ ID NO: 15382 - DNA, 315 bp, Diabrotica virgifera
ctgattaaactaatgtctttaggtgtgaaaggtaaattgatttttaggcgtactcatattgttagcggttcgcaactcggaaaaaggacagcacattaatgacaattcatttttccttaaagcttctcgtttaccttttactcttttacttttataaatacatatagtgatcatgttcttgaattgtgataaaaatattgtaggtataaccgccaaagttgttgaaaggttatatcttttcaaaattgaggttgactcgctgaggttggccgtggtgttgtatgcaacagccatgccttgtgtgattctccattt

SEQ ID NO: 15383 - DNA, 312 bp, Diabrotica virgifera
ggagattgtaatttttttatttcttaattcgggctaaattcacgtccgtttaaacgcgtattttaacattaatcgggtgcagaatcacaacaacccgtttgtccaccaattgggagggtttatccaacctcttaaagtgcgaaacaacccccctgttaattgtaattatttttttatttcttattcgggctaacttcacgttctcttaaatgggtatttaaacgttaattcgggggcagaatcccaactacccgtttgtccaccccttcgcagcgtttgtccaaccccttaaagtgcgaaacgagccccctg

SEQ ID NO: 15384 - DNA, 310 bp, Diabrotica virgifera
cctagcatgagtgcgtcctgttttttgataatttagttaggcgaggaaacataaatgagtttctaatagagcttttcatcgattgtcatttgtttcgagcctctggtagatgttgtataatccgtgtataatattactatacacggattatagacatatgacagaagctcaaaacaaatgactgtgaatgaaaagccctatagagggaacacgaaaaaaattaacattatccgatcagctcgacttccacagttcactactatacaagttacaggcatgttttcagcacttaaaatcaccacaaacgaaa

SEQ ID NO: 15385 - DNA, 314 bp, Diabrotica virgifera
aacattaagtcaaaaacttttgtttttataaaaatattttactgatatagtgcttttaaattgtggatcaaatagctcaaaagagtgattggctatgacatgacatgaaaaaccctagttccagacctggagccaaagcgtccaaatgtctggtatgacattttaatatagatatataccaacgaatataaaatgatatccgttgtatttacaatattaaaaatactagtttaaccaagaaattatataaggttggatatgacctgatcattaatgaaaaatcagggaaatgaacccgaatctataagtaaact

SEQ ID NO: 15386 - DNA, 313 bp, Diabrotica virgifera
  SmartBlast Evalue=9E-19; Info="LINE-1 retrotransposon-like element, putative (Fragment) n=1 Tax=Aspergillus flavus NRRL3357 RepID=B8NZ53_ASPFN"
aaggagcaaatgccggacgaatgggcagttggtcttatacagccaatacataaaaaaggagataagagggaatgccaccattacagaccaattacattgctaaatgtaatatacaaaatcctttctggcattatctacactagattgtcagaatactccgaaaatataattggtgattatcaaaatgaattcagaccaaatagagccactacagacaacatattcatacttagaacaatacaagaaaagcttatgaatacgacatagaactataaaatatctatatagacgttaaacaagcttttgatagtgt

SEQ ID NO: 15387 - DNA, 314 bp, Diabrotica virgifera
atttaaaagtaaaaatcgacctgtttcatgatttttccttaaagtcgctgttttgcgaaataacgaatttattccaaacattggcaccatactgtatattcaactaaattgaatttattgtaacagccttttataattaatttttatataaacgaaaaaccaagggcttacatgatttttattatgcaattcacgtaattgttttatttaattatttaatattattttttattaattgtaaaagaacatgtcttacaaaaaaccctatggaagtggccaactctaattcacctatttttcgatatctaacatta

SEQ ID NO: 15388 - DNA, 314 bp, Diabrotica virgifera
gcaattattatacaaaaaaggttttcctgtcgcaatgtggaaaaatataacaccgcgaggcctaacgactcctatgacatcttcaatatgggaaatggggtgcaagggatacaagaagaacaacatctcactcaatcagcaaattcacagcagcaaacagaagaaaatgaatcacaggctacaccattgaatgatgtcgaaaaatgggaaagggaatcacaggaagagtgacaaagtacaggtgacaagggatacaagaagaacatctcactcagtcagcaaattcacagcagcaaacagaagaaaatgaatca

SEQ ID NO: 15389 - DNA, 315 bp, Diabrotica virgifera
  SmartBlast Evalue=5E-28; Info=Fas (TNFRSF6) associated factor 1 n=2 Tax=Tribolium castaneum RepID=D6WR39_TRICA
tacaatttcatcttctacatcctctggaattaatgggtctgttctttttgcatttgctccttcattgtcaacaaaatactcatcatcaactgtaaaactttcggaggcatcttcaaattcgtcatcgtcactgtcaatttgaaccacgggcatactttttttctctctaacactctgtgtgcttcgtcgcactgatagatcatgttcaggatagtttattccactgagtgcgagtactgtattgtcgtctatattaggaggccacccactccatacttgattacgcacatgtatattcgttaacgtgtaaacgtc

SEQ ID NO: 15390 - DNA, 315 bp, Diabrotica virgifera
caaaatgtaatactattagactattacgtctacatatgtttattttaaaattagtatatcaaatatagagacagtgaattttaagaaatacggtttggtgggaaacttatgtaatagttgaataatttttgttaaattatgctcacaagatttctttttacataatctgccataatgctgcaagcatatagtgtactatcgaattattattgcaaataccagagacatatctgtgtactttgtgggatattttgtttttaatctcattggattctgcaatttgtttaacaataatttattacatccagtgagttc

SEQ ID NO: 15391 - DNA, 314 bp, Diabrotica virgifera
  SmartBlast Evalue=1E-17; Info=Homeotic protein female sterile n= 1 Tax=Harpegnathos saltator RepID=E2B6A1_9HYME
ttcttttttctttttcgagctctcgtctaccaatttacgcattttttcttgcattgccgtcaactctttttctagcagcttcagttgtttgtttcgcctttcttcctccgaatcttccgtgtcgctagaagaatccgaactggaaccggatgtactcgtttctgatttggcaggtatattattaacggcaggggctcctaccctattgacaggttcatcgggaatctttgcatatttcacttcaaacacatcctgcaacttcctcgccatagcaaccacatcgtggtcagaagggttgtacttgtaacaattac

SEQ ID NO: 15392 - DNA, 313 bp, Diabrotica virgifera
ggaaagagcaaaatcttgaaaaataggtgtatttaatttacctacaactttctatagtttgattattaagacatgaaccaatattagacagttttgcaaggcttgaatagtaaagaaatgcagagaagattcattcatctcgttttaattttgtgttcaattatacataacacactgggatttaatggattagaaccaccggttaatagtgtacaattgccaccatgtaaggcttgtaaaacttttatagaatcttttcataagggattggagagaacatcaaaatccaaatttgaaggaggagacactgctt

SEQ ID NO: 15393 - DNA, 313 bp, Diabrotica virgifera
  SmartBlast Evalue=0.000000003; Info=Tubulin beta-3 chain n=6 Tax=Endopterygota RepID=E2A682_9HYME
agccgaacacaacagataactagtttgaacagttgccgtactgaccgtaccccatagtaccgggttccacatccaacaggatggctctaagatcgtatttacctccgtttgtcggagaagcaactgacgcttcatttaactcgctatctcctgtgtatattccagtaggattgattccatgctctcagaaattagttaccaaaacaaagcaccaacttcccatttattccaagtttaaaattgggtggcaaagtgtctacgtgttttaactaattttaaagaaattcactggctgtttttgtacttttatgag

SEQ ID NO: 15394 - DNA, 313 bp, Diabrotica virgifera
  SmartBlast Evalue=3E-27; Info=Nucleolar MIF4G domain-containing protein 1 n=1 Tax=Harpegnathos saltator RepID=E2B2U6_9HYME
cttagcatagcatctcaaatcgaagatctatacatgaacaacagccgaaacgatatgaatgatactctaacaaacctaatgatggaatcactggtagctgaggtactaactccagaaagactgatgattgagcatgtggtgcttcttattgtacttcacgctaatgttggaacagaagttggtgcccatttcttgcagcacgtagccaaacaattcgacgaaaatttcaacagtgaccaggaagttgaaaataaaacattagacaatctagtatgtataatagctcaactatataactttaaactgttcgatt

SEQ ID NO: 15395 - DNA, 312 bp, Diabrotica virgifera
aaatcaaatagggtattccaggcatatgcactggagttttggagtctagttttcatttttcattctacacaaatattttgtagtgtgttgattgtgatagtgtagtggtagtgcttcgaaataaaatgcatcggttacttctattttcggttctgattttgctgacatgttggtcagttaatgcacagaacaaatatacacctatttacaaaaatttcacttatggatcaaataatacaatgaatgctaatcaatatctggaatatattttggaattctcgaaagattatgacgacccagaaattacttgcc

SEQ ID NO: 15396 - DNA, 312 bp, Diabrotica virgifera
ttaactaaaaagcttctaaatatcgatatatttagtacctagtttatgtactatttttaaagtgcattggaaaataatttttataaagaaaaagttttattttaattgcaattctatctaagcttaacaaatatttaactgtataaataataatattcaatcacaatcacatacttaataaaatatttaaaatttcatttcaaatacatttcatacatacattgagaacaaaatagctcttttatttataaaatatatttattattagtatcatttacttattcaatattatcataatatcattcattatgc

SEQ ID NO: 15397 - DNA, 307 bp, Diabrotica virgifera
gtgtgccttgttacagaaaaattcggagcttagtgtagttgaacgttgcaatgtcgagttctaacaaaattatattatagatataataaaatggataagtgtatttttttagtttagataattatgtcgcctgtaaggttgccataatttctatgtaggtggaacgtgctttttgtaaagacaaaattgtgtttgtaatgttacatcagtgttacacagaaatcgattgttatgcagatgcatgttacgggtctaaaatacggaaaaatgttttttaatatttaaaataaaaactgaattttggcat

SEQ ID NO: 15398 - DNA, 311 bp, Diabrotica virgifera
tttttaatatttatctaaatataaaaattattttatatatttggtcctttcgtactaaaatatattaataaattaaagatagaaaccaacctggctcacaccggtttaaactcagatcatgtaaaattttaaaagtcgaacagacttaataatatagctgctacaccaattataaactttaatccaacatcgagtcgcaatctttattatcgatttgaactctccaataaaattacgctgttatccctaaggtaatttattcttataatcaaaaaaattggatcaaaaaattattaattaatataataata

SEQ ID NO: 15399 - DNA, 309 bp, Diabrotica virgifera
gtagcattacaaatttccgctacaatgttttgttaatagaattcattaattttatatcctatcccaagaaaaatatctatttttctaatttattgtgcgagtttatatatcattaaaatttcctaagccgctcctgttggaaatatttcaatatttcgcaacattgaaaaacgttaggaaattttctgtttatttgtgtaaacattcattattctagaatgaatccttgaaaagttctggtatttttccctttcttttgagcggtaagcatttttgttattattggcctgaattttgaaagattgttga

SEQ ID NO: 15400 - DNA, 309 bp, Diabrotica virgifera
ttaatatttatctaaatataaaaattattttatatatttggtcctttcgtactaaaatatattaataaattaaagatagaaaccaacctggctcacaccggtttaaactcagatcatgtaaaattttaaaagtcgaacagacttaataataatagctgctacaccaattataaactttaatccaacatcgaggtcgcaatctttattatcgatttgaactctccaataaaattacgctgttatccctaaggtaatttattcttataatcaaaaaaattggatcaaaaattattaattaatataataata

SEQ ID NO: 15401 - DNA, 308 bp, Diabrotica virgifera
caagtgttacctaatctaaaaatattaaaaaatgtttgccgcatcagctaccagaattgcctcaaggctacaactccagcaagttagaaacatgtcagccatctctggcccaccaaaaataaaaatctcctctgccgaaaagtttgtccatggtattgccttggcagtaggaattgtagctgtcccagcctgggtactagtcaacatcaaacactacaggggaggacctgctgaataaggggtttaaattatagttgtgtagtcaaattttatgtaccattctaatttaagaataaatttattgatgc

SEQ ID NO: 15402 - DNA, 311 bp, Diabrotica virgifera
aaataataaaatattttttagtaaaagtaaagaaaaattttatttaatgatagttaattagtattgtgagagaatattttatttttataaaagaaaaatttattttttgtaccttgtgtatcagggattattaattaataattatatatttattattttcgaatttaaaagagctaaaaaattaaaatttttattgtaaaataaatattttaaataatttttttgtaatgaaatgttattcgtttttaaatatatctaattttttaagaaataaattaaatttatttattaacaatatatttataattaaa

SEQ ID NO: 15403 - DNA, 311 bp, Diabrotica virgifera
tttttatttattttaaaataataaaatattttttagtaaaagtaaagaaaaattttatttaatgatagttaattagtattgtgagagaatattttattttataaaagaaaatttattttttgtaccttgtgtatcagggattattaattaataattatatatttatattttcgaattttaaaagagctaaaaaaattaaaatttttatgtaaaataaatattttaaataatttttttgaatgaaatgttattcgtttttaaatatatctaattttttaagaaataaattaaatttatttattaacaatata

SEQ ID NO: 15404 - DNA, 310 bp, Diabrotica virgifera
tagcaatggcaaaattaaatatcatccttttggtagctgtagttgtagcaggcttagctacagaacaattgagcgcaaatgctggagaaattgtacccatgcccaatcacaagtcataccgcttattcccggatgctactggagactgtgaatgtaagaaatgtaatagagattgtttagcaagatttcaaaatggaggatattgcttccaaagggaatgtttctgcattaaagttgatattgatatttaaactattgtaagtaataaaaataattttataaatttgtataccaataaatatacttaagt

SEQ ID NO: 15405 - DNA, 308 bp, Diabrotica virgifera
ccactgctgcctccgccgccaatgcctcctccgccgccactgccgccactgctgcctccgccgcctttgccgcctctgccgtcttcgccgtttcttccgcctacgtctcctctgccataaccgtctccgccattaccgccccttccataaccgtcttcgccattaccgcctctgctataaccgccttcgccattaccgcctacgccgcctctgccataaccatgtctgccattaccgcctacgccgcccctgccataaccgtctcctccattaccgcccctgccataaccgtcttcgccattaccgcc

SEQ ID NO: 15406 - DNA, 308 bp, Diabrotica virgifera
  SmartBlast Evalue=8E-16; Info=Hemolysin-type calcium-binding region protein n=1 Tax=Lyngbya sp. PCC 8106 RepID=A0YRU7_LYNSP
agtaacaactgaaccgtccccgttgacaatcacaactgaacaatctccatttactataacagctgaaccgtccccattcacagtaacaactgaaccgtccccgttgacaatcacaactgaaccctctccatttactataacagctgaaccgtcgccattcacagtaacaactgaaccgtccccgttgacaatcacaactgaaccctctccatttactataacagctgaaccgtcgccattgacagtcacgactgaaccctctccatttactataacagctgaaccgtccgccattcacagtaacaact

SEQ ID NO: 15407 - DNA, 308 bp, Diabrotica virgifera
  SmartBlast Evalue=8E-18; Info=Endonuclease-reverse transcriptase n=1 Tax=Bombyx mori RepID=D5LB38_BOMMO
gctccttatctttctctgtattatcaatcttaatatttcatatcgctgtcccctcattgcgtgtcccagatattgtagctttattatttttattgcgtttattatttcgcattctttgcccatttctcacagtacttccgtgttcgttttcttctgtgtccatcctattctaagtttccttgtgtaacacattttaaatgactgtagcttatttatgtgttcttgtttccgtgtccagcttttaagtccgtattgtagcatcgaaaccacgtaacacctcagagttcttactttcagttctaatctaa

SEQ ID NO: 15408 - DNA, 309 bp, Diabrotica virgifera
ttaatgagtagtttctctaagcaatgccccccggaacagaataaaaaaatggtttaagcatgtcaagaactattattgtatattatttaatgttttattataatttatatattgtattatgtgactgattgttttttttttcaggttttttttttgtttgagtgctgactgaattgctttgtattatttttcttttgcgttatcccggcttggatttgtcatttgagatgatcatttcagctgtattgtttccttaaatcgtctacaaaaatttgtaaaaatcgaacactacagattctgctgatactc

SEQ ID NO: 15409 - DNA, 308 bp, Diabrotica virgifera
  SmartBlast Evalue=8E-10; Info=Putative ferritin 2 n=1 Tax= Anoplophora glabripennis RepID=Q4PLJ6_ANOGL
cttactgctattgctaaaagctctggacatagagaagaagtttgttcatgaagctcactccatccatcgtgaagctaccagaaacaacaaacagttccacgatcctgaaatttccgattatttggagaaggaagttgtgcacaaggagagagatcttatcaggaagttcacgcaagtcaaagctacgagcttctgcctcttctcctttgatgtctttggaaatagcattgaagttcatgtgtccaccacgagaggtaagatacttaataaattcaataccttcatgccacttgttgtcagacaagcca

SEQ ID NO: 15410 - DNA, 307 bp, Diabrotica virgifera
tttattttaaaataataaaatattttttagtaaaagtaaagaaaaattttatttaatgatagttaattagtattgtgagagaatattttatttttataaaagaaaatttattttttgtaccttgtgtatcaggtattattaattaataattatatatttattattttcgaatttaaaagagctaaaaaattaaaatttttattgtaaaataaatattttaaataatttttttgtaatgaaatgttattcgtttttaaatatatctaattttttaagaaataaattaaatttatttattaacaatata

SEQ ID NO: 15411 - DNA, 306 bp, Diabrotica virgifera
atttattttaaaataataaaatattttttagtaaaagtaaagaaaaattttatttaatgatagttaattagtattgtgagagaatattttatttttataaaagaaaaatttattttttgtaccttgtgtatcagggattattaattaataattatatatttattattttcgaatttaaaagagctaaaaaattaaaatttttattgtaaaataaatattttaaatatttttttgaatgaaatgttattcgtttttaaatatatctaatttttttaagaaataaattaaatttatttattaacaata

SEQ ID NO: 15412 - DNA, 307 bp, Diabrotica virgifera
  SmartBlast Evalue=1E-20; Info=Protein FAM38A n=1 Tax=Camponotus floridanus RepID=E2AY04_9HYME
cattagtaacataacatcaaaaactaactttcgaaccggtgggggttcgaaattatctagaaggaatgcccattcttgtaaccttcttagaatgagatcacgtacgctccaaggatactctatacagagacttggtggcaatccaacggcatggaaatattggaatggtatcgagatagctataaacaccaaataaatcagccatacttgtgataatattcttctaggcatagcgaataatattaaaagccacatgctatgaagcaaagaatataaatccattctgacacctatcaacactaccatc

SEQ ID NO: 15413 - DNA, 307 bp, Diabrotica virgifera
  SmartBlast Evalue=7E-23; Info="Histone acetyltransferase type B catalytic subunit, putative n=1 Tax=Pediculus humanus corporis RepID=E0VPG2_PEDHC"
agtatgtaatttggttcatagatggtgcaacttttattgatctcgatgatgaaaagtgggaaatattttacgtttacgaagaagttaagcatcccaaaacaggtgagatgtgcattactccagttggtttttgtacggtatacaaattttattcgtacccagcaaatatcagaagccgaattagccagtttttcattttaccaacacaccaaaaaaggggtctcggaacagctctctatcaagcagtatttaaaacgttacaaagtcttagttcagtaactgacattacagttgaggaaccaacgcc

SEQ ID NO: 15414 - DNA, 304 bp, Diabrotica virgifera
tttgtaaatattttctacgagcgtgcaaaaatgtctactttcgcgcacgcattttagtttagaaagtttcacttttccgcacgcgtgttacttttccgcacgcgtgttacttttccgcacgcgtttttacttttccgcacgcgtgttaatttagatatgttaatatggccttaaagtaattataatacatgcaataaactaatatttagatattatttgctaatttatttcaaatatatcttattgtgttcctgttttaatgaaattaacgcgacaattcgatgaaataaaattattttgacat

SEQ ID NO: 15415 - DNA, 300 bp, Diabrotica virgifera
aagttagggactttaacaactagccacgttctttatcaatacagggtgtttccaaataagtgcgaccaacttcagaccctttgctctataaacctatgtccgcaaatgcttcgtttccgagatacgggatgttgaatttttcttacaaactgacgatttatttattgctctaaaaccggttgagatatgcaaatgaaatttggtaggttttaagatgtagtattgcgcatttttttacatacaattaagaattttatattcaccattggcgtgcatacgggtcatattacccggtcatat

SEQ ID NO: 15416 - DNA, 304 bp, Diabrotica virgifera
acctggtacacttcaaataacataaaatcagtgtaaaacgaataaaaatagggtttaaaacacgaaatcacttggttacaacatttttttctatgtgaaatgggcttcacctcaccattaattttctgatcgaccatcgacctttgtcgtcacttcactacgactcgatcgagtttttgagggttaaaatgttcgtaggtgcatgaatcctcgtacatatgttactttacgaacatattttactatttttgcgatatttggtacgataatttaaaaatggtacactttttttcgatttagattt

SEQ ID NO: 15417 - DNA, 305 bp, Diabrotica virgifera
atagtcagtaacaactggctgtacataagatgccgtactaggaatgttgtaggaatactggttattcatgaattagaaaaaagtcggctgcacttgcgcagcgggcctaacactgggaaagtttgagtatgtttgagaattagaactaatcttataactactattcttatctctgtttaaaacctgggctagttcttccatatcgtttatagattttagctccatgttgtcgaaaggactcgatgtatcattttcaaaatctgataaattgaaaggacttttatcgtttggattagtgtattgct

SEQ ID NO: 15418 - DNA, 306 bp, Diabrotica virgifera
ttattgcaacaagttccagcagtgtggtggcttcgcgaggtgattgtgtctctccactggtaagttacaaaagctataatattcatctaatttatttgcatttactgctctaatttaatactaatgtaagagttaaaatgtgatacataatgtaccgaaacatttcttatgtcaattagaacataaaaaattatcatgaaaacgtctctcccctgccatatttcccctggcaaaataactgccaggggagatactgtgagtgcaaactaactcaggtatagcttattttcatcaatgttactgttt

SEQ ID NO: 15419 - DNA, 306 bp, Diabrotica virgifera
gttttacagcaaacagttttaagttatttaaaccaactttagtaacaaaataatgtctcatcacggaccacctcaccgtaggagccgatcaccaccaccacctcaccaccatgggcctggacatgaccatcatgaccatggaccaccacaccatcatgatcaaggacctcaccaccatgatcatggacaccacggaccaccgcaaccaggaccacctgctcgtgaatatcctcctggacaatatcctcctggacatcattatccttccagataataacttattcaggtaaaaggaggctaatcagt

SEQ ID NO: 15420 - DNA, 305 bp, Diabrotica virgifera
gtaaaatattgcattgttagctagttctaagctatcctgaaaatttcaggtgtctaggtagtctagaactatttttaaaatggattacaaaatttgcggagtccgtgacaccaaccaacccaagtatataaaaaggttttaaaaagggggtcacgagttgaaattgcgacgtcgtatgaggggaggggtcaactgtaaacgacgctttacgacggaagggggggagggtattaaaaactccaaaatttttacgacgtagtttatggatgttccctagtaggttaggttgcctcatccagtttgca

SEQ ID NO: 15421 - DNA, 305 bp, Diabrotica virgifera
tttacatacaaaagtagtgtttaattgtcttcacaaaatgttgtattttgtgtttgtgtatttttttgtaaaatttattactaattttctttgtttatttgttgcatttacataaaaaaatagtttttaattgttttaaaaatgaagcaggttgtggttgtgtgtttttttgtaaaatgtattactaataaactacacatttttattcctttacttgctacattgttacattgattaccggattacagtcatggcttattttatttagataaatttaggcacctaaaataatttgctttgaaaaa

SEQ ID NO: 15422 - DNA, 304 bp, Diabrotica virgifera
aacatccaaaattcaaaatcagttaaaaatcaaagacaaacaaaaacatactataatagtttagacacattaccgtaaaaactgcataaatttgtattaaaaaaaaactatttttgttattatctatatgataataataggtaattaatatcacatttgggtaatgtaaaaaaataatgtatgaatgcagttttatttaaattcaaaaagtgtagcttctcaaaacaaaaaatattaaaacataatttagttaaagtctatctttaaattttaaacatgcataggtatacataatacaataaaa

SEQ ID NO: 15423 - DNA, 303 bp, Diabrotica virgifera
ttattgtggcttcatcattttctgacttatatcgttgcaaaacaaaattcatttgggaaaaacgaattaaataacttttaaactggatagggttattcgaaaaggaaccaagcgcctatttagtaattcggagaaaattacgttagaagtttagtttaaattataaatcgtgattcaaactttatgaaaatctttatattccatagcattctatgttgttttattgttctagcttgaagtttgaaaataataagattatgaaaagggtggatttttgataattttggcgcatggttctgtttc

SEQ ID NO: 15424 - DNA, 302 bp, Diabrotica virgifera
ttccattttaaaatgtttacctccttaacatttaataagtaaattgaccaaaaaaccctttaccataaaatagccgatccttttttcaattttttgataatatataattgttttaacttgttattctactcatatagaacctaaaccatttgactggtctaaataatgtccagtaaaaaccggttgttcttctactggctttaagtttactattagattgataataaaaataattttgacacgatttcttcaaaaatcaattaatattactcagatttatggtattcgttgatcttaagaaa

SEQ ID NO: 15425 - DNA, 303 bp, Diabrotica virgifera
  SmartBlast Evalue=6E-38; Info=Cytochrome oxidase subunit II (Fragment) n=21 Tax=Chrysomelinae RepID=Q9B260_9CUCU
cgtccgggtgttgcatcaatttttactcctaatgaaggaatagttcatgaatgaataacatctgctgcagtaactaatattcgaatattagtttcaaatgggacagcaattcgattatcaacatctaataatcgaaaattaaaatcatttaattcattagttggattatatatgaatcaaattctacatttttgaaatctgaatattcataggatcagtatcattgatgaccaatagttttaattgtaatagctgggttattaacttcatctagaatataaattaatcgtaatgatgggatag

SEQ ID NO: 15426 - DNA, 300 bp, Diabrotica virgifera
taatcaagaaattgattataattaagtccccttaacaaccatcaaataacaaaatccgttgttcgtacgtcaatcagttgattgtaatcaattatcattatgataattaacataattgatggattaattaattattaattaacataacaattattaacatagctgattaattaatcaattaatctcataattgtaatcaattatgttttcagcaacccaatcaaagttgacattgacagtaattaaatatttgataatgatcagtttattccatttctcattagcgttcgaacaaccggc

SEQ ID NO: 15427 - DNA, 301 bp, Diabrotica virgifera
cgaacaagcaccacacccaacattttttataaaccgatttatttaaatctttaccagcaaagtagttaccgctgacttaaagttgatcgattacctttgattgatatattaatagtgagtgtaacgtaacattttttggtaagcaatatgtaaattatatgttcaattatgcttgtttcatgaccatataatagcttcaatttaataaaattgtttatgattaagctacaaaattaagattaaagacttttcatattatatcattacgtgctataaatctttggatcaagtttggactgct

SEQ ID NO: 15428 - DNA, 302 bp, Diabrotica virgifera
ataacctaagaaattactactctacttaaaaagagccccaccataatcatacaaaagtattttggttaaaagtttttcttcattacatcccctttttgcaagttacccctgcaggcgaacggtttacttcttagacgcgtagaaataaaatataccgaatactttttttttttcatttcttccacacccaactttttttattcgattctctaattatgtatatttctcaaagttcaaataatgtattttttaatttttccaagagggccgaaaattgttaacaaataacttgtctaataact

SEQ ID NO: 15429 - DNA, 298 bp, Diabrotica virgifera
atacaatgaaatataaataaatgcaaaaatatacagtgtgtccccagttgtgacgaaatttggacacactgtatatttttgcatttatttatattttattgtatgccaaaataatggtttactattttgccacacaatgaaatataaataaatgcaaaaatttacgccagttatcacgcaattatggatacatacagttttgcatatatttatttagatttcattgtatgcaaaaaataggctattatttcatagaataatagaatgattcataaatttgattgaactaataataatt

SEQ ID NO: 15430 - DNA, 296 bp, Diabrotica virgifera
accccatctaagtcaaatttttgtgttctctcgtggttattttccacctgttgtctggttctcctttctttattttcctctctggatgataaacaaatgcttgcctcgctctgttgctttaatatatcgatacatttttggcaaagtaacgtaagtgacatttttggcgaaaatcatgtttttccattaaactaacactattattgtttagaagtactgccaagtgtagtaagcctagaattactttaaaccttttttttaactattttaaaaacgtatgtccagaattgttttaa

SEQ ID NO: 15431 - DNA, 298 bp, Diabrotica virgifera
gccggctgtatttgcttttctgtggacaataatcaaatagattttaatatttttttgaaaacggtcgactttgtatggtgcactcagtccataccttcaaggaacgcactattttccgggactgcctgtattatatgaatattttggaagagtctattgagatatatgatcttacatgcctaaactatccatataaaattaaaataattaatattagtattagtatttaaaaatctttggttaataatcctgccaataaacaaattaacatttttcaagttgccaataattcacatat

SEQ ID NO: 15432 - DNA, 300 bp, Diabrotica virgifera
ataagttggtaaggggggggggtaacacttagtccagcgcactgtataagatgaagatatttagatgattattaagaggctacagtagcgatcagtaggtagcaacaaacgcgttccaagattgcggctctaattttgaatattttgtcgagatatttggcacacatattcgtaatataatacagaatggcggtacagagcccaatttcatatatatatgtgtgtatatatatatattatatatatatatatatatgtatatatatatatgttagtacgtggaattactctataactaaa

SEQ ID NO: 15433 - DNA, 298 bp, Diabrotica virgifera
  SmartBlast Evalue=3E-12; Info=Phospholipase C beta 4 n=1 Tax= Bombyx mori RepID=D2XZ02_BOMMO
cgtactggttttgatggccttgcggagctagagcgtagtatcgatataaatgcgattttaatgttaaaataaacaaatttctctttaatataaacaatgtgatttcggtaaaatgtagaactgacgactaatcgtggttttcactaggcctaaaacatgacaaagaagttcgagtttgattggcatatacctgtacctgagccccttttgactggatgtgtgtttgatagatggaccgaagacaaagataatgtagaactggagcaacgagcacttttaaagtcgacgaatatggatt

SEQ ID NO: 15434 - DNA, 299 bp, Diabrotica virgifera
ttaatactaaaaaacttattaataattttataaaactctatagggtcttctcgtcttttaaaaaaatttaagctttttaacttaaaaataaaattctttataaattaaataaagacagtttttttttcatccaacccttcattccagctttcaataaaaaaactaatgattatgctaccttagcacggtcaaaataaccgcggccattcaaattaatcagtgggcaggcgagactttatatttaatacaaaaagacatgtttttaataaacaaggtgaaaaaaatagttgccgaattcc

SEQ ID NO: 15435 - DNA, 299 bp, Diabrotica virgifera
aaaaagttgttgaaaagagtgatattacaccaaaggaagaagacaattccaagaaagttgaagtaaccgtagaaaagaaacaatacaaaggtctgcctatcgacgaatctacaaatctatttatggacttattagatgaacctatggtcatctcagatgatcaagaagaaccaccaaaaatagaaagtataagcgaaaaagaagttcccacagtaaagactgacaaagttgtggttgatgactttttgaaagatactaagaaggaaacattcgtcattactgaaaccacatcaaccgtt

SEQ ID NO: 15436 - DNA, 299 bp, Diabrotica virgifera
ttaaagagccagccattgcacttgcaccatcgtaaaattgagcaattaatttatttttgtaatcatatggctcaagcacgtttgaaattaaactacatagagcgtctgcagatctattctcgctaacatcaaaaaaccctaaaaatctttctgttacctgacaaactttgttaacccggcacctgccacgtggctttgcaaggcatcaactgccacgtggggtgctcacagcaccccttaaaaattttctgtgatctacttgtttataaacaaaataatgtgttgagttacacaagaat

SEQ ID NO: 15437 - DNA, 298 bp, Diabrotica virgifera
  SmartBlast Evalue=0.000000006; Info=E3 ubiquitin-protein ligase KCMF1 n=1 Tax=Harpegnathos saltator RepID=E2BIQ4_9HYME
tgattgttgcgatggcgctaatggtgtattagatgatgtctgaacaacaactggagatgcgttgagcatcaatgtagacgaagagcaatttgatgtgtttggttctctcaatgtttggctctgagtttgtcgtctgggataccgctctagttgttgtctcgcagcatttacttgttgtctttctaattgtaactgcatttgtagctgttgtaattgggttggggtgctgctattagtattgcttgctgatcttctaactcctgataattgagatagcagttccgctattggatccaca

SEQ ID NO: 15438 - DNA, 297 bp, Diabrotica virgifera
ctaaatttcataattatatttatggtagagaagttaaggtattcacagatcataagccattgatttcgataatgaagaaaggcatagctgaagtagattctcctagactacaacgtatgaaggtaaaattattaaaatatgacttaactgtggaatatatgccaggcaaggaaatgctaatagctgatttgttatctcgtaattttgtgaaggaaaaggtagaggatgatgcttttgtaacagaaatagtgcatacaataaatataactgatgaaaggagagaggaatttatagctg

SEQ ID NO: 15439 - DNA, 298 bp, Diabrotica virgifera
  SmartBlast Evalue=3E-11; Info=BEL12_AG transposon polyprotein n= 1 Tax=Anopheles gambiae RepID=Q4JS97_ANOGA
gttttccactgatgaggggaagattgtaaccaacgtaatgtaacagcagaatcagaataacagtatatttccttgatttctactttatctttaataacagaagaaacaaaggagactagtcgagccactaaaaccgcagcagacaattctaatctgggaatagtaagtcccttattaatgggtgcgaccttagatttagctataacaaaagaaacaaaaggttggcctgaaggtgataagcatcgaaagtacaagacagcgcagtaacctttctcgctagcgtcaccaaaacagtgaa

SEQ ID NO: 15440 - DNA, 298 bp, Diabrotica virgifera
cgtgattgggtgaaaagaacgaagtgggagatttaatgatttttggatggagttcgccaggagaggagagggcattgtgaattgaataccgcgcgagagcactacagtttctgctgagacgacgttgataatttgccaagttttgaaaaaagtataagttgtgaaaagttgtatttgtgtgtggtggaaggagttccaactgtggtagcagacagaagaaataactgacatgctgtaaataataaacagatgtatagtttgatactggactaagtcgattagttgagatatccttgtg

SEQ ID NO: 15441 - DNA, 294 bp, Diabrotica virgifera
  misc_feature (108)..(108): n is a, c, g, or t
tttactgtaacattttttaacagattttttgaacttatttcgataaaatattgtaaaggaatataaagaaagaagaaaaaaggaatttggaaaatagaactttttgtntaaaaaaattgatagctttccttacatagtaggaaatttgcgcttcttttgaattccttcgaattctgttaatattttagtacttttgtacaattttcggtacaatttttgtttacaaacagcttatgctttgtttaaaacaaaaaaaaaaaaataagaataaggtgaaattttcagaattttcag

SEQ ID NO: 15442 - DNA, 297 bp, Diabrotica virgifera
aatgaaaccggttaatatggccccccttaataattgcaccgaccttattggttgtcttaataatgtaactataatatctctgaaagcaatttcaatatatatttggaatatcataaaacttagatcttttgttttaaatgaataagcttcagtttctccttcattggtgtttatttaagaaaacaagttctccatttcagttagtgatagcgcttaacttttgtttaaatttgttaatagttatttatgttctagactagttgttagttatattctgtacttactaaactcattgtt

SEQ ID NO: 15443 - DNA, 285 bp, Diabrotica virgifera
aagtgtacccattttacagtctgtttcaattgacatggtaaataatttaaattttttcacgagaaacaatatttacagaaatttttgccgatatacagcaaaaaccagacaaagtgaagatatatgtttacgaatacatacaaataaaataatcttggtaagcctagcaagaggaaatgatataataacactcaatccagttaaaacaatccaggaaataaatttcaatatcaaaaattctgacagagctagtgttaaagtacttggaaagcgcaagttggggac

SEQ ID NO: 15444 - DNA, 287 bp, Diabrotica virgifera
cgaaaacgtgtcatttttaaatgaaaatggccaattttcaactacgcataactcaaaaagtattgagttctcaaaaaaaagtatagatcagtttttgcttagaataggttctctagccacttccatgcttatttttaaccaacaaattttccaccctcttgaaagggtgggaattgccccaagataaaaccgccatagtatatagggtagattttgtttcttgagctattccctacttactgtgaaaatatcaagtacatcgatgtagtaggatggaattcggtgcc

SEQ ID NO: 15445 - DNA, 294 bp, Diabrotica virgifera
cgggccatatcttatatgtacacaaaatactaagaaactataataatataccccaggaaataataataatgactaactgtagcagacaggaatgtcatgattcgtacataacaggcaccacagtctaaaaatagattttgataacgcgcagtgtaaaactacttggaattccacataatagacggtattttactaaacatcaacttcagaatatattttttattcgtaaaatattgggaatttttttattcaaaatatgaggatatctagaatgatattaaagtcaaataaaaa

SEQ ID NO: 15446 - DNA, 295 bp, Diabrotica virgifera
gcaataaacgaattgaagacacaagtgcatgaagggtctatgtgaaaattttttcaaaatatgttttttatgttaaaagtaagttgttcgaacctaaaaatctttcaaacaagccaaacatgttttaaaattaatattttctaagttactagagtgtaaaggatctatgtacacagtaaattttaaaatgtaattgcataaaggatctatgtacacaatatgttacttatatcccgtatccactgagatttctatggatttgttgtacatggatcctttatgcctgaatacactg

SEQ ID NO: 15447 - DNA, 297 bp, Diabrotica virgifera
aaaatggcaaaatttactctctttcttttggcagctgtctttgtagctgttttagctaccaaagaagtcagctcaagtgatgttaaagttgttgatgatccagacgatgaaccaactactacaactactgctcccgctacgtgtgactgtgaacaatgtaacactcattgcacagaggaaagcaaattagacccacccaaaaactacgctggaggagtctgtgtagataataaatgttattgtgtcgaaattgtttaaattatattcctttatattatcaataaatgtttttaaatg

SEQ ID NO: 15448 - DNA, 296 bp, Diabrotica virgifera
tttatttattttaaaataataaaatattttttagtaaaagtaaagaaaaattttatttaatgatagttaattagtattgttgagagaatattttatttttataaaagaaaaatttattttttgtaccttgtgtatcagggattattaattaataattatatatttattattttcgaatttaaaagagctaaaaaattaaaatttttattgtaaaataaatattttaaataatttttttgtaatgaaatgttattcgtttttaaatatatctaattttttaagaaataaattaaatt

SEQ ID NO: 15449 - DNA, 296 bp, Diabrotica virgifera
  SmartBlast Evalue=6E-35; Info=Sarah n=1 Tax=Tribolium castaneum RepID=D6WAW5_TRICA
gactatagctggttgtcctggagacgaaggatgcaactcattgagtggcaccaggagtgagggtagctagcgcagccagcaagtcgtggttgatgatgggttctccttcggcgcggggctcccaatctaacggcggtgatgcgggtggtgaaattaggaactgtttgtaaggagctggcggttgcaaattcggatttttcaccggtgtgaccggttgagcaaaataacaggttataactgactcgttgattttgtactggtgaagttcaattctcgcactggcggctgcgtaggga

SEQ ID NO: 15450 - DNA, 297 bp, Diabrotica virgifera
atcaaaaacctgataggaagtgatttcttatgcacttacatgcagaatcattgatataccattaacccacgaagaaactcggtatcattgaaaaatatatgtatacacaataaaaaatttaacttagcagtggatttaaccgtattgtttatgaacttggattatcagaaccacaatattattttcaacatatcaaaaaaaaacctatagtttagagagtgaagtgaagacaaaatatgacaaaaaaaagaaagccgttttacaatacacaacaggcaaccataataagcgaatctg

SEQ ID NO: 15451 - DNA, 295 bp, Diabrotica virgifera
aaacgacctaaaacatcaggacagccatctggaactacggattgggatgttacttctatagttaatcccgtaaacaaacttagctcaaaatttaaaatacccaagttatctgaaaaaattgctaatttgagttctgataaaaaaactcaagctaaaaagaataaaaaatacgaagataaagaaactaggcctttttggcagaactatagtgatgacggtttaagttatagaaatgctcaacgtatagcagctaataaatcgaaacgaaaagatgagagttgtagggccacttctt

SEQ ID NO: 15452 - DNA, 293 bp, Diabrotica virgifera
gcgcctacgctccttaaaaggataaaagtattatctatttttgtaatcagtatttgaaacgcttttaaatgagatataacatgatgtactttcctatttaaaaaaaaatcaaagttttgcctgtcacctgaagagggatcgcgtaaagttcgaaacattgatgctacaatatactttgattattaaaaatcgacccgtccgagcgtcctgatcatgtgccagaaataaacaagttattaaggggggggggggtttaatttaattttgtttagtttatttaattttatgaattt

SEQ ID NO: 15453 - DNA, 290 bp, Diabrotica virgifera
tctggacctgaattttccttgtgattactaaatgggtcgttgcaatgtagtaaataagtattgattatttttaaaatgagtattgttcattaactttataatttattattaaaagttaataataccttgctttttaatcagagttcttaaaaatttcaatataatatttaaaattaaagcattaaattgtcttcctcactcccaaacaaccctcaaacacatcggcacactatcaaataattagaaaaaacacgtgaaatttgacaaataatttggtcacagggcccttt

SEQ ID NO: 15454 - DNA, 289 bp, Diabrotica virgifera
ttcgcgtcgaaagacctaggtaaacccaataacgactgagttattgctctttaaaggatgttattttcgaagacctcgaaatggagaaccttcaatctcaaataactcgaatgtggtgcaatttgaaagttggtcaatctatcgacttccgcagttattttgattgaaaaaattgtcatcccctagatggagttatttttacccccaggacaaaagcccgcttcggcatggggtagattttgaagaagagggtcaaccgagcttaaataaaaattttcattaaaatcgg

SEQ ID NO: 15455 - DNA, 294 bp, Diabrotica virgifera
attttgacttttcaagttttagtaaacaacaaaattattattaaaaatgaataaaagcgatctttgctcgaaatgtattttagaaatggccaaagaattaacggagaatgggtttactcgaaccgatatgcttttgaagatttaagattttgacgaatgttggtttcatctgtctgggtacacaaatcctcagaatatgaggatgtgaagcacagataacccgcattattttatttaaactcctttatatccacagaaactttggagtttgggctgctataagcaagcggcgtg

SEQ ID NO: 15456 - DNA, 293 bp, Diabrotica virgifera
agacgatccactgtgtagttgtggtaaaatgggtacattggtacatgttttacttgaatgtccaataaatattgtaaacattaataatctatataaaaacttaattcactacaagataaaccttccaatagacctaaattgtattattttttcaggaaataataatatactttatgtacttcatcaacacatcataaactgtaaactaaaattgtaaaattactaaccaattttgtaagcaattctgcaaaacaaactaaatgtaaaacattaaagaaaaaaaaaggtgaata

SEQ ID NO: 15457 - DNA, 289 bp, Diabrotica virgifera
ttaatgatagttaattagtattgtgagagaatattttattttataaaagaaaatttatttttgtaccttgtgtatcagggattattaattaataattatatatttattattttcgaatttaaaagagctaaaaaattaaattttattgtaaaataaatattttaaataattttttgtaatgaaatgttattcgtttttaaattatatctaattttttaagtaaataaattaaatttatttattaacaatatatttataattaaatattttattattattaatattaaat

SEQ ID NO: 15458 - DNA, 291 bp, Diabrotica virgifera
ctcagactagcagtaggcggttgttgacaaaaacaccggttttcggttataccggttttttttagctacagtttaacctggcggttattaccggtcaacaaaaccggttattccaaaaaccggtgttaggttttttactaaaagccaataccaaataagttacatttacatcgctttagtttgcgatactacactcgaatcgatatcagtccatatcagtatagaaatcagtcattagtgttgtaaaatcggtttcagtcagcttaaagtttctcatttatgcacgggggc

SEQ ID NO: 15459 - DNA, 291 bp, Diabrotica virgifera
ccctattaagccaaaacatcgaaaaccttgggttacgaaaggtattcgcatatcagccaagaatatgcgttcactactatacatcaagaaatttactaccaatgtttctgtcactgaatatatcacgaagttgcaagacaacatatctaaaacttgtcaaatcagctaaaaaccctattatcaaaatcgtctgggaagctctaaaaatgttgcaaaagaaacttggtctataataaacgatcttcgaaataaaactcatacagctcaaacattttcccttccagatccaga

SEQ ID NO: 15460 - DNA, 288 bp, Diabrotica virgifera
taagatatattaaaactcgatttaaagaaagttaattcacctggactgtttaggtgctgagaaacgttcgagtatgccactgctaaaataggagaattcctgttgtgccaccatttgtcgacaagattagaaacagagatgtcacatattttttgtagtagttcagtttggatgtaagactggcatttaagaataaatttttcagccaaaaaatagtcgtcttaaatgtaaaggaggctccatggattcagctaaaagattctctataggcgtagacttgagcgcacc

SEQ ID NO: 15461 - DNA, 289 bp, Diabrotica virgifera
atgcgttacctttttcgttttccggtgacacaattgtaatgtatctgcttgtttcaactgcgtagcttcactagaaacgaaattagagaactataggttcttccaagccctgtgttaactttttcgctttccggtgacccaattataatatatctgcttgttccaactcagttgcttcaccagaagcgaagttagaaactataggctcttccaagatgtgcgttacctttttcgctttccggtgacacaattataatatatccgcttgtttcaactgcgttgcttcacc

SEQ ID NO: 15462 - DNA, 291 bp, Diabrotica virgifera
gcgccggatcgtccatcttggctatctaaggatggaatatacactcatttaaatccaatgaacatcgatgtagacaaaaaatcactaagacttgtgcaacttaggctccgcagtgggcccatgtctgtttcttcaatttcttcattataatcacttcgaacaataatttttggcacttcacttaatttaaagagtctttgccttatctagtaattcatttatgaatttttttatatcactttgggatcctttggcatttatgagtagattctgtaaatgcctccgtcgctc

SEQ ID NO: 15463 - DNA, 288 bp, Diabrotica virgifera
attatccatctaccttctctctggtcaactgagtaagaaatgataaagtaggttttatttatctttattacatatctttatatgaatttatatttatcttgaaataattatttttatttagttaattttaatttgtttggtttatttaaagagtttttctttgtcttccctttcaaaactaaaagatcaaagtggcgccctttcggctttatattgattcattatttatataaatttttttgtccattatgtcctaatttagctctagtagctattttccatttttta

SEQ ID NO: 15464 - DNA, 289 bp, Diabrotica virgifera
gcggctacaatttatcgactataatttaatcgttatttctattctcagaataaaatttgattatgtttactattttacaaagtctctaaagccccacaacagataagaaataatattcacttcgtgaatattgctatagctcattgcaattttacgcatactataaccatgtttaaatcaaaaaatgtgattaccaagaacataatattaaaaattaaaaatttcatacatttttatattcgagaaatcagaattcaaactaaaaataaataaataatttcaagaaaat

SEQ ID NO: 15465 - DNA, 291 bp, Diabrotica virgifera
cgtgggggccttggtccattttagaagtgatttggatagagagaatgactgactcaaaacatgatattgtgtatcacaagtatagtttgttctaagattgattattgtaaataatcatttaagtatgtagatgtatacaaatatcacttgaataaagctgtataaatgcagcaataaaataaaaaaaaaaacgataactcatttgtctttacatttagacatagaccagaccaaatgttatgatagttgctactattcgtcattgatcacgtaattctatagtaggaaggc

SEQ ID NO: 15466 - DNA, 289 bp, Diabrotica virgifera
gattaattttatttaggatgctaattagggggtgattttcgcgaatttttaccaaacattattttgagcataacttaaatctgatgttagaaactttaaaacaaaaccaaaaaaataaagcttttttaaacactttaaaaatttaataatgagttttctccgataagtacttgattttttggtttatttcacgttaaaatatttgatttggaatttgacaaatcagaacctaattttcgttagctacaactctgctgctactgggtctaaagactacatcgatatacca

SEQ ID NO: 15467 - DNA, 290 bp, Diabrotica virgifera
gccgaattcctttattaaacctatatatttttacaaatatacaattttttaatactaatattatcatcattactaaatttaaataattttaaattttatatttttaataaaaaaatttataaaaaaataaaaataataatatataaaaataaataataacatattttaaaatatgaaaatttttaatcctaatttttatttaaaaattaaattttaataaaattttatttttaagctcatccctaaaaatatttaatattaataatataaaaatatttaattataaatat

SEQ ID NO: 15468 - DNA, 290 bp, Diabrotica virgifera
ataagacacactattatagatctattgtgatattgataagtacctattataatacctaatagtacaatttttgcctgcctgtgtgtaatcattacctattactattattacttagtaactcttggtttttgtgaaacttcaaattattgttcatttgcagtaccatgcaagagtaatgtctacattcaaattcattgatgtgagcgcaaatcttactcatgcccagtactcaggttgttatggacatcctccaactaagatccacaaagcagatttacaacaagtattag

SEQ ID NO: 15469 - DNA, 287 bp, Diabrotica virgifera
  SmartBlast Evalue=2E-20; Info=Multidrug resistance-associated protein 7 n=1 Tax=Harpegnathos saltator RepID=E2BGH7_9HYME
ttttgtctggaccaattttgttgaacaaattagtagactttatagaaaagagatctatagatatcaaatggggctatctgtatgctgtgctgttggtggttagcacttctatgtctgctctctgtgattcccactttaatttcaagatgtctgtgatcggtctcaaaatgaggggagctataatcaatactatatacaggaaaactttatcagtgagatctacggttttaatgtctaaattatctgtgggggagataatgaactacatgtctacagatacagaccgg

SEQ ID NO: 15470 - DNA, 285 bp, Diabrotica virgifera
  SmartBlast Evalue=3E-24; Info=Heterochromatin protein n=1 Tax= Clytus arietis RepID=Q9N6U3_CLYAR
aattcttactgtattttctacagtaattattgcctctcctttatccaaatcatttatactgtcttcccaggctttgatctttttcatttgaacttccctctttaaaaccaactgatacaacaaaatagatcgctttccttcttctaatttatgaatatgtctttctttaggtggtgttgccaacagttgcaacaatttttcctgtatatctagtttttcaggaagggtactaagatcaaggattttaaacgctcaagcaaattttgatctgaaagttgaccagat

SEQ ID NO: 15471 - DNA, 283 bp, Diabrotica virgifera
gtccggaataagaatgacgtaactgcaaattttgtcaattcctgtttattgcgtaattaacttctaaaatactgtatacagatgatacaaaagcgacagaactgtaactatgtgctgaagccaccacagggtagttgcgtcgttattgaaatacgcaccattttagaccttgtttcagatgaagaatgacgcaactgtaaatagggttgaaaatgagggactaaattacgataatgaaatttggaacaataggggatgaaaataagagcatcgctgtgagaag

SEQ ID NO: 15472 - DNA, 283 bp, Diabrotica virgifera
ggggtggagctggtggtggatatggcggtggtttgggaggtggattaggcggaggagccggaggtcaaggaggttatggtgggggcggctcaggaggtcacggaggaggcggtctaggaggaggcaagggaggaatagttcttggtggcgacggagacgatggattagtattaggcggaggaggtaaaggtggcggccattcaggaggatatggaggatctaaaggcggtggttatggaggtggaggcggttgccccggaggatgcggaggtggtgggggagg

SEQ ID NO: 15473 - DNA, 277 bp, Diabrotica virgifera
ggactatatacgaatttatcaatgttgagtcattcttactaaactttgacatttgtcacctcatttgtgattctacccggtataatgacagaggagttacattggcggtcctacggaccgacggaaagattgcccaggtcaaatatctcaccttagtaccatccttggattataagctttcatttgacacctcatttgtcattctacctggtataatgaggaggaagttatattcgcggtcggacggaccgacggacagaccgccaaggtcaaatat

SEQ ID NO: 15474 - DNA, 282 bp, Diabrotica virgifera
gaagattcttacgtttttactaactgtccaacttactcatctacaatgctcgcgaaggtgtttttagctataacattagttattgtgatattctttactggtactgggagtattcctttagaacaaagtgatcacactaatcagagtaatcacattatcacaaataaagatggctgtttatcatgtaagataccgaacaacacaccaaaacctccttcttgtggaccatgccaaagcttagtgtttaataagtgtaaaaacacatttaataaacaatgtcca

SEQ ID NO: 15475 - DNA, 283 bp, Diabrotica virgifera
attacatttcagtccaatattgaggcttaattaagcgtttaatagaaaggttcaaaatacaaatgcgtgatacctatctatctcaaataaaaggtacattttatctgtacttttagtatagatattttaaaatattttcaaattttatatacgcttaactcttgtaaatatgttttttatatcgcaggccgatataacccactttatttgttagatatacacaatgggtctaaaccagacgaaatgaactgcaacagaacaaaagtatttgaaagttcacggc

SEQ ID NO: 15476 - DNA, 280 bp, Diabrotica virgifera
ccccttacttttcagcgacggatctcgtttcgctgtaaatttatcagaaaaatttaagtacaaaaatcttttcccctctaagtgtgccatgattaatatgttaattataaagatacttatgaacaatatactccaataattaatttcctattggtggatctcgggttgtcctcgatttagtcggatctcgccttgatatgaagacgtatatatatatatacacatatatacacatatataatatacacatatatacacatatatacacacatatatatat

SEQ ID NO: 15477 - DNA, 283 bp, Diabrotica virgifera
gctagctgagccacaaaggaaaatatctgggtaaaaaccctttacataaaatatagatgccttaaaagtgcatacttcaagaaaaaggcctgtgatggtcacatggcaaacaggataatgccctaaggtaaggtatacaggtttcccaacacgtgggatccaaattgagttgatcacatttcaatgacttaatggcaactgaatgcgaaatgagtgatgtttctggaaaggtgtcaaaagacagatggacaacgtgacgtggaatttaccctgtattacgaca

SEQ ID NO: 15478 - DNA, 280 bp, Diabrotica virgifera
ggttgcatcattttttgtttcatcatgtgttggggcatcatcattttttcgttcatcatttcgttattcatcatcatgtctggttgcatcatttttggttcatcatgtgttggggcatcatcattttttcgttcatcatttcgttattcatcatcatgtctggttgcatcattttttggttcatcatgtgttggggcatcatattattttccatcattctttggttaatcatgttttgggacatcatgttgttgtccatcattgattgcatgttcatcat

SEQ ID NO: 15479 - DNA, 278 bp, Diabrotica virgifera
ggcttgtcaaataagccttacacattatgtaaataaacatggtataccagagtatgcattatgggcctctttactggatatgtgcaccatctgcacagcaagtcattagtacatcttgacgtcaaatcggataacatcttgctgcatggaaaatgttttaaactggcagactttgagcataaaacctttgactcaaaaactgtaaaagaattttaaatttaaaactataaaagtaatttaggaaaaacaatatctaccaaaataaaataacgataaaa

SEQ ID NO: 15480 - DNA, 278 bp, Diabrotica virgifera
ttgggagggagatgggggagaagccggtaaactagtagctcctttaagcctttcgtcaatatttccaaaactatgccctagcgcaaacaatgttatatacaaaaataatctacatgaaattcaaaacaaaaaatattccatacacaactgttacaaaatcaacggttccagagctacggagggcgaaacgtcgaggttctcgacactttttatattttttgggcaatatttattccaaaaacccagacatccaaagtgaaagttatcctccaacacca

SEQ ID NO: 15481 - DNA, 278 bp, Diabrotica virgifera
ggggaattttctaatgattttctgtgttctgtaggtacaattttagctggtttgatgggagagacttctggagttagaggagttgaaggtgtagttggttccttgcccccaacccgtctgataatatcaggagtagagaaaagagcaaaatcatccggaattggttttggtatcttcttctcttttttcactggcttcttttcagggggtttaacttctgcttctttttccacttctttggtatctaatttaggctcttctttcttctctttaacttt

SEQ ID NO: 15482 - DNA, 278 bp, Diabrotica virgifera
ccagccatgtttttcatcaatacagggcgtttccaaatatgtatggcaaacttgaagaggtaattctgcaataaaaaaaacaatgacagtccgccttataaacgtatgtccacaaattgctccaaaaccggttatgatatacaagtgaaacctggtgggctccaagaggtagttattgcgcattctctgatatacaattaggaatctaatattcaccactagcgcgcacacggataatatgacccttatgtgcaccaatggtgaacaacaaaattccc

SEQ ID NO: 15483 - DNA, 278 bp, Diabrotica virgifera
  SmartBlast Evalue=5E-31; Info=Ribosomal protein L29e n=1 Tax= Georissus sp. APV-2005 RepID=Q4GXB7_9COLE
agttaaagtaaaactgaggaggttctacctatccagcaatggccaagtcaaagaatcacacaaatcataaccaaaatcgcaaagctcaccgtaatggaataaaaaaaccaaaacagtttcgccatgaatcaaccttagggatggatgccaaattcttaaaaaaccaaaggttctctaagaggcacaatcttagcgccaagcaacaacttaagcgtgcaaatgaaaggaaaacagagcgcgataataaaggaaagaaataggtgtaacattacttagta

SEQ ID NO: 15484 - DNA, 264 bp, Diabrotica virgifera
acctgttacttagcgcagtaatggctataaataaagaccccaactgcatgtatatagaaatgcccaacatatgtgttattatcgaggccagtgctgtaataaacttcaccgcctgtaataaacttcgtcctttatatctaccgatattgattattgtaggaaatttacaatttacgatttacgtctcattgttcaggtagaccatggacacctaataaactacgtaagaagcatcaaaacattttaatattattgttgtctgat

SEQ ID NO: 15485 - DNA, 273 bp, Diabrotica virgifera
tttgacaatttataactttattatttgtactccgattttaaagattcttgcatcagtttgtaggtacatgttttcatgtcgtttactattattcctgtaacaaaaaaatgtttgcttagataacattatatgggggtgaatggaagcgtgtattttctcctaactttaaaaaattctgtggaaaaattggagggctgatgttgattgacatactccttttgtattatcctggaggtatcactggggtttggttttgaattgtccgaatatcta

SEQ ID NO: 15486 - DNA, 316 bp, Diabrotica virgifera
aataaaaattaaataaaattatacaatatatcttgtaaattaatgcttagaaaaagatattaccagatctatttttttcgatgactgacttaacaataaattgaataagatttatctcgtgaagtatccaattgtttaactccctgatcaccaaggagaacgtcatgacggaagaaatcaaacgtcttatattaaaaccaaaagaagaattatttcggataaaaatttcagaaatgtgtacaatataactatggcattaaaacctaatgtacacatctgtggacaaatgtttttgatgactgataacttaacagaa

SEQ ID NO: 15487 - DNA, 276 bp, Diabrotica virgifera
  SmartBlast Evalue=6E-19; Info=V-type proton ATPase 16 kDa proteolipid subunit n=8 Tax=Endopterygota RepID=VATL_DROME
gtacctcttacaccagcgtcacctacgataccaatagcgaaacctgccgccaatcctgaaaatcctactgaaagaccagcacccaaatggacaaaaccactgtacaatgaatatgtagagctgtcttggatgttaccagagatcagtacagctatgaccagaccgtagatggcgctggtgtaagaggtaccgcacaacagccaagactcttcgtaggaatgatcttgatcctcattttcgccgaagtatagaggtaaatggcgacgatgagaccat

SEQ ID NO: 15488 - DNA, 276 bp, Diabrotica virgifera
cagaattaccaccacttttaagacggtacctattactcaagtttgaacagatttattacaattttataggtgctttttttaaagcttaggacgtaatctttaaaatgcaccgaattattttactttagagatgaaataaactatttctttttgagaaaattaagaaagataacaaaaatgtaatacaaaaaccgaaaattaccagctaaaaaaaaatgtttatacaaagtgatcaaaacttacctaaaataacatttaataataagcttcaacaat

SEQ ID NO: 15489 - DNA, 273 bp, Diabrotica virgifera
gcgatgacggtcactaattcaatacttcgtctccatctaaaaagagcacaacgtccctaaagaagtgttcacttcaaaaatttattacgtcgaagcaatgacggtcgcgatgacggtcgttaattcaactactttttccccatctaaaaagtgcacaacgtccctaaaaagttttcactttcaataatattactattattatacgtacattataataatatacgtacaaaatttatttcgtcgaagcgatgacggtcgcgatgacatgacggt

SEQ ID NO: 15490 - DNA, 271 bp, Diabrotica virgifera
tacgattatttgtattaatgtatcatttcagatttttgtagtcttttcttaatatagtataataaacggggagagaaaaggtgtgcgctgtatttgaaatgtttttggaagattttactttggatcagaatatgacaaatttacctatcaatcttgtataaatttcccaaaatgttgctgttattattcaagtaaaaagagtctgaacattttgggatttggattttttcagagaatatacgtttttggaaacgggcgtcaaaataaatct

SEQ ID NO: 15491 - DNA, 273 bp, Diabrotica virgifera
cagacttgcgacttacatattttgtgtttctatcatgtgacgtcacttgatatgacgcggatgatatgcatagggatttatgctgtacagatcatagtcaacatcaacagtatttttaataaactaaaaggaggaatatttagttctatttagtttttttcaaacgctaaccattctagaatgctattatttttgtcctttaattctaatactcatttgtttgatcttgcttgttcaacctttcttgtaccattattatatacactcaccggc

SEQ ID NO: 15492 - DNA, 273 bp, Diabrotica virgifera
aatatttatctaaatataaaaattattttatatatttggtcctttcgtactaaaatatattaataaattaaagatagaaaccaacctggctcacaccggtttaaactcagatcatgtaaaattttaaaagtcgaacagacttaataatatagctgctacaccaattataaactttaatcaacatcgaggtcgcaatctttattatcgatttgaactctccaataaaattacgctgttatccctaaggtaatttattcttataatcaaaaaaat

SEQ ID NO: 15493 - DNA, 275 bp, Diabrotica virgifera
tttaatgatagttaattagtattgtgagagaatattttatttttataaaagaaaaatttattttttgtaccttgtgtatcagggattattaattaataattatatatttattattttcgaatttaaaagagctaaaaaattaaaatttttattgtaaaataaatattttaaataatttttttgttaatgaaatgttattcgtttttaaattatatctaatttttttaagtaaataaattaaatttatttattaacaatatatttataattaaata

SEQ ID NO: 15494 - DNA, 272 bp, Diabrotica virgifera
tatttaaaaatcagccttacgactcacaaaatgcacttatagtagtttaaattattacagctaatataaaatataataaaatattaaaataaaaaaacattaaatcaataaataaaatcgtacacataacattttatcttcattggtgtaaattcagtacattctttattatttactagtttctatttttttcatataaaaaagtgaaatagctaccttgcaaacaatactgataaataaaagaaagccaaacagtatcacggagagattcg

SEQ ID NO: 15495 - DNA, 272 bp, Diabrotica virgifera
ttttgtgcagtgtttattcgatattataggatttatattaaatatattaataaggtattaccaaggagtctacctgccaaatttcaaaattttccaatcaaaaatgagtgagtaaacagaaaaaatcctatttttttacattattttatttattttgtgcagtgtttattcgatattataggatttatattaaatatattaataaggtattaccaaggagtctacctgccaaatttcaaaattttccaatcaaaaatgagtgagtaaacaga

SEQ ID NO: 15496 - DNA, 271 bp, Diabrotica virgifera
tttttatttattttaaaataataaaatattttttagtaaaagtaaagaaaaattttatttaatgatagttaattagtattgtgagagaatattttattttataaaagaaaatttatttttgtaccttgtgtatcagggattattaattaataattatatatttattattttcgaatttaaaagagctaaaaaattaaaatttttattgtaaaataaatattttaaataatttttttgtaatgaaatgttattcgtttttaaatatatctaa

SEQ ID NO: 15497 - DNA, 272 bp, Diabrotica virgifera
atttattttaaaataataaaatatttttttagtaaaagttaaagaaaaattttatttaatgatagttaattagtattgtgagagaatattttatttttataaaagaaaaatttattttttgtaccttgtgtatcagggattattaattaataattatatatttattattttcgaatttaaaagagctaaaaaaattaaaatttttattgtaaaataaatattttaaataatttttttgtaatgaaatgttattcgtttttaaatatatctaa

SEQ ID NO: 15498 - DNA, 270 bp, Diabrotica virgifera
actaaattaaaatcaacaaaatttcacctgcaatcgatgtttttggtttgataaattcctctctttccttgtctaagataaattccataaacataacctcttaaattagtaacctacaaaattctacaatgccattatcaaataatttcaatgctttcttaggagctgcttttctgggggtagttagtgctgcaagtatgtatctcgtcgagcattacagacaagacaaggtacgccacgccatggcaaaggatttggctcgtttagacc

SEQ ID NO: 15499 - DNA, 261 bp, Diabrotica virgifera
tgtcctgatccccttaatccaggaatattggtatccgacaacgacatttcaggaggtctcttcgaatctatcaacttaagaattccagaaataggattgttagaaacgcctatttcatgcatattgatcgttgataaaaagaagagttcaactgacccaattattggtgcaggaggtgtaggttctccatatgttgaaataagtatcaaaccaggattcttcgaatctcttcattataggattgaagtgtacaggaaagca

SEQ ID NO: 15500 - DNA, 268 bp, Diabrotica virgifera
gcgtttttataaagcacacttgttcggattacactctaactgcgatcgaacaaaggtgacattttggcataaattggtaacatttatttgatagttgcggtattgacacttcagatttgtttttattctttactataagtatttgttttattacatactagagattttgcacgtcttattttgcaattccgttatggttatcgttatactacgtctgcgcagtagcgaatatatgatccgttatcgttattaaacataagggattccg

SEQ ID NO: 15501 - DNA, 267 bp, Diabrotica virgifera
  SmartBlast Evalue=5E-17; Info=Cell growth-regulating nucleolar protein n=1 Tax=Glossina morsitans morsitans RepID=D3TN85_GLOMM
ttttgaaccattttgaacttgaacatttttgaattattgaatttgtgctttgctcctctgctaaactaaagtataaaaatggtggtgtttacatgcaattcctgtggagaaagtttacgcaaacccgcagttgaaaaacattacaatttttgccgctccgctaaaaatttaacctgtgttgattgttttaaggactttcggggagaagaatatgtaacccatactaaatgcataacagaagaggagaggtatgcaaaaaaaggatcg

SEQ ID NO: 15502 - DNA, 259 bp, Diabrotica virgifera
cgactgtgatacaaaacgataatcgatggtttcgacggttaatccagaagatttattcgacggtcattctaagagattcacgacaggtttcgacggcgattccacgagctagttctgagctgcacgctgctgttcctgatacacgccgctggtcatgctgtacgctgttggccctgctgtacgctgttggtcctgatgctacaagctgctgaacatgaagctgcacgctattagtcccggtacgacaggctattggtcc

SEQ ID NO: 15503 - DNA, 267 bp, Diabrotica virgifera
ttattttaatttcatttaattgtttccgtggacaataaggttattacatgcaactcagcacaccacggaacatttcatttcagtttcattctaatttttaaaaaattgtatagtagtaacaaaactttttagcgtaaaaaatattgttagcgctatactattattaatattaagcgcatattagagagatatataggaatgattttttaacattttcaaggtgggttacattttaaacaaacaccctattctatagtgatgcaagag

SEQ ID NO: 15504 - DNA, 263 bp, Diabrotica virgifera
gattggtagcaagctgaaaatttgttaatagcttaagggtgtctagtcggacaaactttgatatatgggaacactggaacaggggaagttttaattgtggaacaggttaaaaatttggaacgtcagactacgaaaacgtcacatgtattttgtcggacagaacttccaattgatttgttaccctttcattaaactctcatgcaaaaatcagactgctattactaaccaacatgattcctgtcatttgacaagttcttcgtgtt

SEQ ID NO: 15505 - DNA, 261 bp, Diabrotica virgifera
attgacgccgctgtaaatgtgagtgcgagtaagatgcatatcggactgctggaatggcttctctctcgcactcagcatttacagacgccgcacacgtgcatggcgctcattattattactcaaaaataacaggttagtaataaaataatgacaaaaattttttcaggatcccgtaggagggattttaaactttgattcagtcatataccgactttcataataacacccctcaaccgagttattaagccctgaaaatcgcca

SEQ ID NO: 15506 - DNA, 259 bp, Diabrotica virgifera
ataagtaattatctaccaataattaaataatttggtgacttaaaagccttcttggtttggattatagttccagaagctgatgaaaattaaacgaatattttacaacaattcaattgttaattgatagtttgcggtcgcaagtgataaccaaaatattatgatacactgatcaagctttgaaatcttatagggatgagatgcctatttgacattttgtcgacaaaatataagtttttttattttttgcataatctttaaa

SEQ ID NO: 15507 - DNA, 264 bp, Diabrotica virgifera
acactgctccaagatgaaggtactcattcttctttccgttgttgccttgagcagctgcttaccagcatccagaaatcaacaatacgttgatgtagactacaacagctacaacgctcatcccgtctacaacttctggaggacttggaatcagcaacactatggacaagaaccatggaaccaatgggtacaatatggtgtccagaaccaacccggtaactactggaggcagtacgtgcaacgcagcaaccaagctgaaaatgtcga

SEQ ID NO: 15508 - DNA, 264 bp, Diabrotica virgifera
gtagggagcaaagtcgtacttttcctccatatggaggaaaagtaaaagtgacatcatggtatgtcattgatgaaataacttattgatgccctatacaatattctactatctattacgtaagtatttatacattttaacgtttatttatagagcaccctgtattttgcagaatggtaaaaacagtaaattgttattttgatttaacaatgtttacattaataatttgacttatatttgacagttgacagttatattgtacctact

SEQ ID NO: 15509 - DNA, 260 bp, Diabrotica virgifera
gaccatcaatcatctatgggagtgaatcgtggacgctaacaaagaacaacaaaagaaaaatcaaagctacagatatgagattcttgagaaaaatagaaggggtcacacgaagagacaaaattagaaacgacacaataattcaagctctaaagataaaacccatagagacaattatagggaacgacagttaggatggttgggacacatccatagactaaacgacacaagaataacgaaaaaagtatatgaagtcagagtac

SEQ ID NO: 15510 - DNA, 264 bp, Diabrotica virgifera
actagaattacagcaaagtgtcaaagataacggcaaaagcaaggctgaaattcgacaattacttctcaagttcacttttatacaaattcttatgtatctaggtacatatgaggggaatgcggtattttctaaataaaacatagatggcgctgctacaattaaaattatcgatgtcatgttgacacaattgtgacaaaataacatatccaatgttcatatgtcatcaaatctgttcaaatttgattgtatttgttaccaaacgat

SEQ ID NO: 15511 - DNA, 259 bp, Diabrotica virgifera
  misc_feature (169)..(169): n is a, c, g, or t
gtctccatctcgttcattctctttaagtgacctagtcgccgcaacctgtttattttgatggacctaccaatactatgttcactataaaggcggtaaagctcaaaattatagcgcccatgccataatccgcacatccgcacgcctgtctgcggattttacgttcaaaacngcctaaaagttcttcatggctttttgtcatcgtccacgttgctgctcatgcgcatatcaatattttccttctttttgtgactatgtttaa

SEQ ID NO: 15512 - DNA, 259 bp, Diabrotica virgifera
gtttgtaacaattcttttgaccactcggatcgaaatccaccctcaaaattcgtgatcagcggccaaagatccataagaaaccgttgagtttgtccatcagagttgaaaaggacacggtgacccctctggcgcctagactcctaagctatagaaatgtatataggtacagtatttttctagggcaatgattcagttcttttcattagactcattcaatgagcatatccgactcacaagcatatcataaactgatcaaggt

SEQ ID NO: 15513 - DNA, 263 bp, Diabrotica virgifera
  SmartBlast Evalue=8E-27; Info=Ribosomal protein S29 n=7 Tax= Neoptera RepID=D1M7Y8_9CUCU
gctgagctaacgtgttgtcgataacacaaaaatagttttaatataaaaaatgggtttccaaaatatatggtactctcacccccgtaaatatggacaaggatccagatcatgccgtgcctgctcaaacagacatggtctcatccgtaaatatggattgaacttgtgccgtcaatgcttcagagaatatgctggagacataggattcaagaagctggactaaacatcaagggaattttttatatacaatgttaagttaataatat

SEQ ID NO: 15514 - DNA, 261 bp, Diabrotica virgifera
  SmartBlast Evalue=4E-14; Info=Endonuclease-reverse transcriptase n=1 Tax=Bombyx mori RepID=D5LB38_BOMMO
attaactgcagcatcctgtatctgctacctctcattatatgccccagatattctaagttttctctttttttattatcttgattgtcaccttcgcgttgacctactctcttttaagacttctctgttagaaatgcgttgaacccaagatattctgagcattctacgatatgaccacatcccaaaggcttctaatttgttcatcatgttaacctttatgatccaggtttcacatccctatagtaatacaggatacacataaaa

SEQ ID NO: 15515 - DNA, 261 bp, Diabrotica virgifera
  misc_feature (155)..(155): n is a, c, g, or t
gtgatatggtctttttttagcaatttttgtcttacctgattgaggttgacagtatctcgatgtcatcttgatatcttaatgccgttgacctcaattgggtgggatgggaattgttggaaaaagatcatattgtggcattgtaccattttttaaanattgtggctttcgtctgatgatgctgatgggaatcagcgaagtgtagcgatttgttaaacagagtgccacttggttttgttcagctgtgtgcccagtaggcctcaa

SEQ ID NO: 15516 - DNA, 260 bp, Diabrotica virgifera
  SmartBlast Evalue=2E-12; Info=Elongation factor 1 beta' n=1 Tax= Spodoptera exigua RepID=A9LSA6_SPOEX
gcaattaattcaggtttcttggatttcttttctgcataggctttaagtctttcttcacgtactttagctgcttcagcatcttcttcttcgtcggaggcaaatagatcaacatcatcatcgtcatcatccttggcaggtgctgtggtggtaggagcagatttcaaggggttacctgagactccggcctgtttaagctcatcagctgagaaagatttgatgtgattgtaccaacgtaaagcatggggtaaattggcagctgg

SEQ ID NO: 15517 - DNA, 258 bp, Diabrotica virgifera
gcagcttcttcaacttcattaggtgaactgtctcttttattagcaacgggtttcttatccttctttgctggtgatgtcttattttcttttgaggtatcatctcctgaagctttttcacctcctcccacattcatttcttgttcacatctttctttatccttctcgttatcatcatcatccctttcttggcctttagctttaacccttgccagatacgcatcaggagcagcttcttcaactgagtctccaaactcatct

SEQ ID NO: 15518 - DNA, 258 bp, Diabrotica virgifera
tgcaatttttagcgcgaaagtaggcttgatacagagccggagataaaatgttgactcgaagcgactgacatgcttaaactcgcgcgagttgtgtatgtgggctggtagctacggtactgtattattctactttcgcgcgtgtaaattacaaaaaatatatttataatctttaattaaaatataacgattaagctgataatcgatattgttttataaataattagcttgtactttaaactcacttccacgctttgaaag

SEQ ID NO: 15519 - DNA, 257 bp, Diabrotica virgifera
aataaaactataaactcttatctcacaaagtgtcacgtctatgggtcaagtatttatcgttagatgacactagtgtcattatacgattatccaaaatcaacgacacaccgaacacaaacagtgtcacaaatcgactagtgcaaagcattttttgtttatctaagatgtgtataaagcgtcgtttgtcgagttaagacatataataatattatattaatattacataatgatattatattatgtgctgcaagtgtcac

SEQ ID NO: 15520 - DNA, 257 bp, Diabrotica virgifera
  SmartBlast Evalue=7E-12; Info="Zinc finger, C2H2 type family protein n=1 Tax=Brugia malayi RepID=A8NRC4_BRUMA"
cataaaacaaatttcacacttataagggttttccccagtgtgcaatctcaaatggtatttcaaattggctgcttgactaaactgttcaaaacaaatttcacacaaggtttttccccagtgtgcactttcaaatgccttttcaaaggacctgcttgactaatctgtttaacaacaaatttcacactcgtaggatttgccttcagtgtgcaatatcaaatgtgttttataattacttgactgagaaaaccgttttaaac

SEQ ID NO: 15521 - DNA, 256 bp, Diabrotica virgifera
  SmartBlast Evalue=8E-11; Info=Encapsulation-relating protein n= 1 Tax=Diabrotica virgifera virgifera RepID=D7EYY4_DIAVI
gttgggtgctcaaaactttaatcaattggcgaacttgttggtagactaatacttgttgggaaagcaagtcttggggaagacgttgtccttgttgaatgaattgctcaacttgttgagagatcacattttggtgatataccaatgattggataagctgatctacttgtttgttcaaaccatactgttggacatatatttcttgagaaattggttggttctgttctacaagttgttgtgctctctggttaattaagga

SEQ ID NO: 15522 - DNA, 237 bp, Diabrotica virgifera
ccatgaccatttaagatagattgttctaggttaccaccctggcttgagctgctgcttgtttgagttattgtttgagtctttgtagaactgcttccataaccatgtccattattttcatgaccagttaagactacttgttcgaggttaccaagatgttttccattgttacctccaaggtgttttgttacagttgtttcaattactttggagccgcttccgtaaccaataccattattt

SEQ ID NO: 15523 - DNA, 255 bp, Diabrotica virgifera
  SmartBlast Evalue=5E-19; Info=Histone-lysine N- methyltransferase SETMAR (Fragment) n=12 Tax=Harpegnathos saltator RepID=E2C6C7_9HYME
gaaaactaagtctccaattgggaaagaaaaagtactcttccaccatgacaacgcaccggtccatatctccgctgtcgccatagccatactggtcgaattgggctacgaactgctgtcccatctaccgtattctctagatttggccctgttcgacttatttttgtatccaaacttgaaaaagtcactcgcagggcagacatttaagtcgattgaggagttcttaacctcgaaagaccgtatttttcagacgggtta

SEQ ID NO: 15524 - DNA, 252 bp, Diabrotica virgifera
  misc_feature (241)..(241): n is a, c, g, or t
tgaggtgggttaaaagacacaatgaaaataaaggcaaccgcattgctggccagctagctagaaaggcaactggcctgagactcttagggtctggtgatctttttggctggtcaattacaacaatcgtggaaattgtaaaatgtcactcccacaagcaaatcgtgaaagtgggaagaagggccaggatgtagacttgtcaaggtaacactaaggaaccttggaaaatcagcatcagaaaatnttgagatcacc

SEQ ID NO: 15525 - DNA, 255 bp, Diabrotica virgifera
actgaaacttatctaaatgttgaaagaattcaactaattcccttaaaactaccattcttaacctctcaatatagacaaaatcttataacttaaagccattagtgccattagcagcttttcttgggctatgttttacttttacagatccatcttgcattccaaagtatgccatcactgccatatcaacaaaaaggccagtttctacaacaccaggaatctgtagaagctcggaatttatactactccagtcataat

SEQ ID NO: 15526 - DNA, 254 bp, Diabrotica virgifera
caatagttggtgctaatgaattaggaatactttgaattcctttaggaggtcaaagtattcctaattcaatagttggtgctaatgatctatgaatactttgacctcctaaaggaattcaagcctttaacccattagaaatccctttattaaatactttaattcttttaacttcgggattaactgtaacttgagcccatcatagcctaatagaaaataatttttctcaaggacttcaaggattaatttttacagta

SEQ ID NO: 15527 - DNA, 253 bp, Diabrotica virgifera
gccctgagtaatctgtttgcatcaatttagtgccgaaaatcctcgaaactccagaagatggcgtagtgctttagtaattatcctgggcaccaggtgctccaggtatcggttctgatggcgtattaatattcaacgaccccaaaaacaacacgagtaacaaaatctggctcttaagatattgattttaagatgtttatccacttttcaaacgaagaaattgtatttttccagacgtcattccgaacattatagt

SEQ ID NO: 15528 - DNA, 252 bp, Diabrotica virgifera
ggagttactgcgcaggaaatataaaaataatgatttgtacacaaacaaagcatataatttataaaggaactattgatgtcttgatgtatttgctgctcttattccttaattccccaacttctccaataaccattcttcagttaaatcttccaattctcttatttcaaagcttctagtaagttcagcttctttttgcaacgcaatctttgaaccagcatacatcatctgcaattctgcatgactatctcttgg

SEQ ID NO: 15529 - DNA, 250 bp, Diabrotica virgifera
tctaaatataaaaattattttatatatttggtcctttcgtactaaaatatattaataaattaaagattagaaaccaacctggctcacaccggtttaaactcagatcatgtaaaattttaaaagtcgaacagacttaataatatagctgctacaccaattataaactttaatccaacatcgaggtcgcaatctttattatcgatttgaactctccaataaaattacgctgttatccctaaggtaattattc

SEQ ID NO: 15530 - DNA, 251 bp, Diabrotica virgifera
attcccttgtatattatgacttcgttcaatctcaagataagctcgatgtcagagtttcagacacaccttcagatcattgaatgtgtctgaaacggtggcctcgaacttaacttggggatggacgtagtttcatttcctcatatattatgacttcgttcaatcccaaaataagctcgaggtcacagtttcagacacattttcagatcattgaatgtgtctgaaactgaggcctcgaacttatcttggagatg

SEQ ID NO: 15531 - DNA, 250 bp, Diabrotica virgifera
  SmartBlast Evalue=9E-12; Info="Cathepsin L-like proteinase"" n= 1 Tax=Diabrotica virgifera virgifera RepID=Q70EX2_DIAVI"
gttgttgtcaagaataagataatacacaatgaaagtgattgttgttattgcttgtcttattgtggcaattactgccaaattgaacaattatgatcactgggtctccttcaaggctaaacattcaaaacaatacaaactactagaagataaactaagattccaaattttccaagaaaaccttcgcgaaatcgaagagcacaatgcaagatacgccaaaggagaggtgggttggttcaagggggtcactaaa

SEQ ID NO: 15532 - DNA, 249 bp, Diabrotica virgifera
gccactcacagtcgtatctgctttttggtattggttttatctagttaggaaaaatattcgaagtgcattgctttttttaagctctctatttagtatagtataaagtaactttgattaattcgtaacagttcaaaaagcgtaaatctagtagatattagacaaagaaaaagaattttacaccatagttctatttaaaacagtttgcttgctttagtatttatgaaatacagtagaacgtcaataatccgg

SEQ ID NO: 15533 - DNA, 248 bp, Diabrotica virgifera
  SmartBlast Evalue=2E-17; Info=Cytochrome oxidase I (Fragment) n= 1 Tax=Chaoborus crystallinus RepID=Q8LX70_CHACU
ttttttatttacagttggaggattaacaggggtagttttagcaaactcctcaattgatattgtacttcatgatacctattatgttgttgcacattttcattatgtattatctataggagctgtatttcatgatacctattatgttgttgcacattttcattatgtattatctataggagctgtatttgctattatagcgggatttatccaatgatttcctttatttaaagttatacctgtaaataaag

SEQ ID NO: 15534 - DNA, 239 bp, Diabrotica virgifera
aaaaacgcgaaaatggccatttccaaggcttaataactcggttaaaagttattattatgaaagtcagaaagtgactaaatcaaagtttaaagccccctcctacataatcctgaagaaatttgtgtcattagtttattgctaagctgttatttttaattattaacaataagccgtaagagctggggatgggaaaaacctccggttataacctaaaaccggttttttcacgtaataatcgg

SEQ ID NO: 15535 - DNA, 242 bp, Diabrotica virgifera
tctatcattacctccaatgacaacggttgcatctctatctctggatgttggaaggtcaagaagaggtctgtcattacctccgacaactacggttgcatctctgtctcttgacgttgggaggtcaaatgttggacggtcaagaacaacaggtctgtcattacctcctaggactacagttgcatctctatctctggatgttggacggtcaagaagaggtctgtcattacctccaataactacag

SEQ ID NO: 15536 - DNA, 239 bp, Diabrotica virgifera
tgaatttatctggttatcaaatttattagatacggttttgttgttaatgataaaaataataccttctaaaaactttatacatttatgaacgttattttttgtatttagatttagtgaattccgttatctgtgatggcaacaacgccgtgattcacgagccattgtgtccagtctgaacacaggtttacattgggaaaaaaagtgtaccagttttttatgacgcggaagtgtacatagtg

SEQ ID NO: 15537 - DNA, 243 bp, Diabrotica virgifera
aagatatatagtacggtggggaagacagagacgacgagagtggaatcagcatgtgacgagaatggatagcgagagaattgcccgtatagccagagatgattcgaagccaataggcaagagaccaataggaaggccctttaaaaggtggcaagatagctggcagttaacatcacagctacgaatacaagctcaaaatcggttaagaacaggccaggaagcctaatctaagaagaagaagaagaa

SEQ ID NO: 15538 - DNA, 243 bp, Diabrotica virgifera
  SmartBlast Evalue=1E-33; Info=Heat shock protein 90 n=3 Tax= Cucujiformia RepID=A6YM15_TRICA
actaaatctgctttcgtcataccaataccagtatcaatgatggttaaggttccttcactcttgtttggaacaattttaatgtgcaaatcttttccagagtcgagacaggatggatttgtgagtgattggtaacggatcttatccaaggcatctgaggagtttgagatcaactctctaaggaagatttctttattagagtagaatgtgttgatgatcaaactcatcagctgagcgatttcagcc

SEQ ID NO: 15539 - DNA, 243 bp, Diabrotica virgifera
gctcctgtagtgatctttttccaagttaaactattattcttctaacttggctatactgtactgatgacgactaatgagtcagaaacacgtgtctgcagttgcattccatctttttatattgttaattttgtattcacattcacattgcgagttatttgccaatgatttttcttttctatgtttatagttgtactcgcttacttaacatcctttattgtataaggttttggcttttctttcctc

SEQ ID NO: 15540 - DNA, 238 bp, Diabrotica virgifera
tcgatttcttcttcgttttttgattataacttcaaaagtactcacttccgagaaaagctgcactgtgttgcacataaaagtggcgcaaccaaatttcctacaacataggaccagttgaacattttaaaaatggtcacccttgttgcagaatagcaacaattgcgaaaaaaacataaaaaaaacaagtattcgcattttacgcctttcaaccatctatgccacacacaggaccttcata

SEQ ID NO: 15541 - DNA, 242 bp, Diabrotica virgifera
  SmartBlast Evalue=3E-12; Info=DNA-directed RNA polymerase II subunit RPB2 n=19 Tax=Neoptera RepID=RPB2_DROME
gctaaaatcaaaatcggcaaacatctgcacgaaaatagagttgtgcttctatatttattttgtaattttgagtaccataatatactaagatgtatgatcaagaagatgatcaatttgacgatgaagatacagaagaaatcagtggagaactctggcaggaagcctgctggattgttattaatgcctactttgatgaaaaaggtttggtacggcagcagttggatagttttgatgaattcatt

SEQ ID NO: 15542 - DNA, 238 bp, Diabrotica virgifera
gggctgaccaactatcactattcgcggtgtgcaagtacttggaggggatacgagaaacgatcgtgcgcgaatagcggagaaatattgcagtctttttaaataattcatattgtcaattgaaattgtcaaattgacgtacatttcatacctattgtcatttaagaagaaaaattatatattgctccacaatattgatatgatatgcaattattatataaaggtaaatttaattaattgc

SEQ ID NO: 15543 - DNA, 239 bp, Diabrotica virgifera
ggggggagttatggaagattttaaggggtcatgggaaattaaatttgcgaatatacatagaactgtatattatactctcatataatcacagaagataggacctataaattatttccagggccctctgttgataagtagtataatgttggtttactgttctctacatttgactactaatttattaaaatgcggaaaacattttaatttgggggatttgagcttaatttgagagaatttca

SEQ ID NO: 15544 - DNA, 238 bp, Diabrotica virgifera
ggttttttcttgctctgaatagttcgattgatgttcgtccatgccattccgtcaagttacgcagccatcagattgatcatgagaaatccataggagtaatgtctggcgactttggggccacgttgcgttactacctctgccgcatccagaaaaatgctggtttaggaaaccgagaattttcagttcggagaaaaaaccgatattagttcgtttcaagatcaactagaatattgacttc

SEQ ID NO: 15545 - DNA, 235 bp, Diabrotica virgifera
ttaaattaaaaattaattttttttaagttaaaaaagttaaaagtaaaaaaattttttaattttaaattagtaattaagtttaaatttaagttaatttagttagtaagtaagtaaattaatttttaattttttaataaaaagtaaaaattttatttttttagttaacctttagttagttaattactaagggtaatttaatttaaatttaaattaaatttaattaattaattttaat

SEQ ID NO: 15546 - DNA, 233 bp, Diabrotica virgifera
tttgagaaaggtacggctcttccagcatctttgagcgtcactaaaatccataaaatattcaattaattttaactcagcaagcattttcatcttgtaaacatgccttttataaattttaacttattcaactttaaaaaacttagagctaaatcaagatatcttataaaaaaatgaaaaatatgaaacaaaacttttaagaaacgcttttctttacttacgagcgaccaaaaatt

SEQ ID NO: 15547 - DNA, 235 bp, Diabrotica virgifera
  SmartBlast Evalue=2E-25; Info=Prolylcarboxypeptidase n=1 Tax= Culex quinquefasciatus RepID=B0XH18_CULQU
tctaattgtgcgagaagtggtccactggcagacatggccccatgcaccaaatgggggtacttttggcgtacccaggcagccaagtttccgggataagaacctccgaaaacaatccattttacatcagaactcaggttgtgttgttggttcatggcttcaatgaaaaatgctaaatcgcttagggcctgctggcttgttagatatgccagattctcggtacttaaatctttggtcg

SEQ ID NO: 15548 - DNA, 232 bp, Diabrotica virgifera
tctatctatctatctatcagcgaggttcctacagcctctgccgcttctcgcatttcgaccgccatcgttttctgtccatccattcgtcttctttgatggctctatctttcatgatgtgccgtacattttcttcccaggcaactgaaggtcttccccttcttcttctttggtgtggtatgtaatttaaagctttctttgaccatctatcttcattcattcgtttcacgtgacc

SEQ ID NO: 15549 - DNA, 234 bp, Diabrotica virgifera
tttcattgtatgccggatgtaccaatcaaactgggttttttctcaattatcacaacaccctgtattgataaagaacgtggctagttgttaaagtccctaacttttttttacacaacataggcgaatgaatgaagggcagaatgttaagaaaatatagcctgaggctatagttgggttttaatttcaatattttataaatgctagaatattcctcagggtgttgtgaaagttgag

SEQ ID NO: 15550 - DNA, 231 bp, Diabrotica virgifera
aaatatttttttcagccaactttcaatatctcttcttctttctaagtttttggcctccgacagtcagttttttaattaatttcttcgttaaaagtagtttaatcaactgagacgtttccgtatttaattaaaatcttttagtggatttcttaaaaaatattttaatcggttctctataataggtctctatgttaaaggcctctataaatgtaaaagttaaattttagaggc

SEQ ID NO: 15551 - DNA, 232 bp, Diabrotica virgifera
aggatgaagacagggtttaatgtaaatacttatggctaaaatgctgcaactatttttgaattgtgattgtctatgtttagatttttgtatacatagttgtcagatttcaatttgcataccaaaatgtattttggttttttagtcaaacggttgcatttagaaaaaaatgttaaaaatgaaaaaaatttagaaaaaaaagacttttttgctctacatggtgccttctacctat

SEQ ID NO: 15552 - DNA, 230 bp, Diabrotica virgifera
caatcacaactgaaacatctccatttactataacagctgaaccgtcctcatttacagtaacaactgaaccgtccccgttgacaatcacaaatgaaccctctccatttactataacagctgaaccgtcgccattcacagtaacaactgaaccgtccccgttgacaatcacaactgaaacatctccatttactataacagctgaaccgtcctcatttacagtaacaactgaa

SEQ ID NO: 15553 - DNA, 229 bp, Diabrotica virgifera
gacaatctctttaaaataattttcaggggaatcaccaaaattagtagtttgaaataaaaccccctggcaaagttccagaatctccttctgcaatgggattatcggacgttactaagaagtctgctaaatcattgtctatatatagctgctgaaggagccctaggtatcttttagaaggtttaaaaaaatctttgtagttagtgtatccatattcgttttcaacttgaaa

SEQ ID NO: 15554 - DNA, 215 bp, Diabrotica virgifera
atatacagtgatgagcgcgctaataccggcaaaatagctcaaaagatggaaaacataatacattgcgaaacaagaagagatgaaactagtggagatggaaatgatcgttataaacgtataaattaacataaattacatagtttcccacctttagacgtagcagaggagtatgacaactgtcactgtggtagtagacttttataaaatatcttctt

SEQ ID NO: 15555 - DNA, 222 bp, Diabrotica virgifera
ttgtccgctggtataaatggtattgaaaaacgaagttatagcctctaaaacattgctatcatttataagcttgtatatttcagttggaatttcatcaggaccagtcgctctgccatcttttgatgattgtatggcttttattacctcagagcgtgttattaggggtcgtcgcagttagtaatatcggaaggtgaactactcctatcgtcttcgaataggttc

SEQ ID NO: 15556 - DNA, 225 bp, Diabrotica virgifera
gcaatgtgtaatggagaagaaaaggtactcaggttcataaagtgttgccattatcagtcatttacgtgcagcatttgaaatcgtttgcaattattgtaaaaattagaatgttgattctgaccaagtcagattctgaaatactcaaattttatacaaattggcctgtccatcgagggctcctaaaaattgaagagttttcctgattttttttagattaaccttcag

SEQ ID NO: 15557 - DNA, 224 bp, Diabrotica virgifera
  SmartBlast Evalue=1E-16; Info=Peritrophic matrix protein 5-B n= 1 Tax=Tribolium castaneum RepID=D1MAJ6_TRICA
gcagtagatggacccgattcagtttatttgcctctcagggactgtactaaattctgccaatgttccaacggtgtgccatatgaacatgcttgtcctgctggtcttcacttcaacccaaaactgaaggtttgcgattggccacagaatgcaggttgcggaggctcagacccagtgacaacagaacagactgttacaccaacacaagacagcggaaacaacacaaa

SEQ ID NO: 15558 - DNA, 221 bp, Diabrotica virgifera
tttagtacgaaaggaccaaatatataaataattaaagatagaaaccaacctggctcacaccggtttaaactcagatcatgtaaaattttaaaagtcgaacagacttaataatatagctgctacaccaattataaactttaatccaacatcgaggtcgcaatctttattatcgatttgaactctccaataaaattacgctgttatccctaaggtaatttatt

SEQ ID NO: 15559 - DNA, 212 bp, Diabrotica virgifera
gataatattagtattactaaatttaataattaataatatataatatatatatatatatatatatatatatatatatatatatatatatatatatatatatatatatatatatatatatatatatatatatatatatatatatatatatatatatatatatatatatatatatatatatatatatatatatatatatatatatatatatatat

SEQ ID NO: 15560 - DNA, 218 bp, Diabrotica virgifera
ttgaaaaatgctcagacccttcgattagtatttcaaattgtcatttttgacacacaataacaatgtatacagggtgtcccaattcagagatatgacgtcatcgctgattttcttaaatggcaacactgtcatttgatagctagttttaatagggtgtgtaaagttatacataatttgcaaaatttcaaatttttgattccctaccatttatgcaagat

SEQ ID NO: 15561 - DNA, 219 bp, Diabrotica virgifera
agcggcggcagcacgcagcaggcaacactggcaacagcagtttttttaacgcgcggtggctgagaattgagaatgctgttgtaaatttctttgttaatcaaataaaactttgtttcaacatattgcaaaattcatctaaacgttcaacatgtcacaaactgaaggctcgacagaggcgagcgtaagtgcctcagaaccaatggaagaagcagagaactc

SEQ ID NO: 15562 - DNA, 214 bp, Diabrotica virgifera
cttgttgaccaacatattgacaagccagtagaaagtatcaaagtcaccagttctggacaacctgtcactaaagatcaaactattgatgtaacaaatgaaaatggtggaactaccgttactaaaactactgaatcaggtggaattaaaaccataacaactacaatcacaaaaactagctcaagtaatcattccgatgaaaattcttcaaatttgg

SEQ ID NO: 15563 - DNA, 216 bp, Diabrotica virgifera
gtcatgcccttttaaatgttgtacttagtgtgtgtaccaattttcagctaaatcgatttaaaattaactgagaaaaactgtataaaaaataattttgacaatgcctcctcttaagggtgtcgatatcctaaaagaattaagttttctgttcgtttgccccaacatttttgtcagacaattacattttttgtttaagaatataattacttgtaacct

SEQ ID NO: 15564 - DNA, 214 bp, Diabrotica virgifera
gtagaatttcttttctataaattattatatggctttgttaaatgcctgtttaacgtcaatctttgaataacacgtctatcgaattttgctaaaaactatccagtgagctctgctgaaattgaatgtaatgtcacagaaaagttcagtcactgattctgattctacagttttattcatttagaacattttataaagtattttattaaattgttac

SEQ ID NO: 15565 - DNA, 206 bp, Diabrotica virgifera
cacttgtcactcactgtgttctaggattgtaagcatataatctattcttatgtatttccttgattttattgttttccattctgatcttacaattaacgttatttacctctgttattgtgaagggcctacataaagactatcaaacttaccattctcttccctttttaccaggactaggtctcctattttaaagtgttgtggtgttg

SEQ ID NO: 15566 - DNA, 211 bp, Diabrotica virgifera
tttaaaccggtgtgagccaggttggtttctatctttaatttattaatatattttaaaagtcgaacagacttaataatatagctgctacaccaataataaagattgcgacctcgatgttggattaaagtttataattggtgtagcagctatattattaactttaatccaacatcgaggtcgcaatctttattatcgatttgaactctccaat

SEQ ID NO: 15567 - DNA, 206 bp, Diabrotica virgifera
  SmartBlast Evalue=6E-13; Info=Canalicular multispecific organic anion transporter 1 n=1 Tax=Culex quinquefasciatus RepID=B0XBQ1_ CULQU
attttttaagaaaactttacttgccaactggtcgaaatctgcagagactggatacagcagttcgaagtccaatgcttggccatttaaactcatctctcgaaggactttcaactattagagcatttaaagccgaagaaaccattagcaaagaatttgatagacatcaagatttatatacatctgcaaactatacttcaaatgctgcc

SEQ ID NO: 15568 - DNA, 205 bp, Diabrotica virgifera
  SmartBlast Evalue=0.000000002; Info=Endoglucanase-5 n=1 Tax= Humicola insolens RepID=GUN5_HUMIN
gtgctactcttcctcaagctttacagtctggatgttactttagatttgatttctaccagaatgctaacaatccaagaatgcatttcgaccaagtccaatgccctgctgaaatcgttgccagatctggttgcagtctttaaataataatataatataattatttgttttaaaacaattatgttttacttaagtatatactcaattt

SEQ ID NO: 15569 - DNA, 200 bp, Diabrotica virgifera
aaattttctggtcggtcttaaaaaataaagcatttgccggtgcctaacgttaactttccggtcttgaccggcaaaacggtgcttttctggacaaaaattaatctagaaaagtataaattttctggtcggtcttaataacaaagcatttgccggtccctaacgttcacttaccggtcatgaccggcaaaacgctattttct

SEQ ID NO: 15570 - DNA, 202 bp, Diabrotica virgifera
tagttgaaatttgttatattatcggggtttttgaggtcgccgaacccgaatattgcattgaagatgatgtaggaagtacccgggtgaccggtataaatgtcatgtctcggagttgtatgaaaattaattatggaaataattgaaatttattatttcggggtttttgaggtcacgaatattgcatagaagatgctgtacgagc

SEQ ID NO: 15571 - DNA, 201 bp, Diabrotica virgifera
  SmartBlast Evalue=6E-11; Info=60S ribosomal protein L5 n=2 Tax= Bombycoidea RepID=RL5_BOMMO
cctggtccttgttcagcagcttcaacattgtattcgtccccagtaacatcagtggtgccactgtataaattgtcaagtcccaattttttgaggagccttctggccaaaagtaaaccagtggcataggcagcagcatagttggtaagaccagttttgattccatatctgggcaattcatgggagtaagcagcacatacaatc

SEQ ID NO: 15572 - DNA, 199 bp, Diabrotica virgifera
gtttataattggtgtagcagctatattattaactttaatccaacatcgaggtcgcaatctttattatcgatttgaactcgatgttggattaaagtttataattggtgtagcagctatattattaagtctgttcgacttttaaaattttacatgatactgagtttaaaccggtgtgagccaggttggtttctatctttaa

SEQ ID NO: 15573 - DNA, 615 bp, Diabrotica virgifera
  SmartBlast Evalue=2E-56; Info=210kDa protein (Fragment) n=1 Tax= Sarcophaga peregrina RepID=Q9GV23_SARPE
gagatgattacaaagttgtcagaggagatagagttgaaattgttaaacatgaagataatcttcgacctgaaggtgattttgaaagaccaactcctactaaaattggacctgctgaacgtaggactccaattaaacatgatgataacctacgacctgaaggcgattttgagcgtcctgaaagacctggttatgtaccagctgagcggccgagacaaaaacgaccagaagataatcttcgaccagaaggtgattttgaaagaccaagtccaactaaagtcggacccgctgaacggagaactcctattaagcatgatgataacttacgtcctgaaggcgactttgaacgtcccgaaaaaccaacatataaggcagctgagcgccctactcccaaaaagccagaagataatcttaaacccgaaggagaaatgcaagttcctgagaaaacgcaatacagacctgcagtgagacctacacagaagaaacctcaagataatttaagacctgaaggagaatttgagagacctgaaattatagaggttggtcctgcagaacttagaaagccaataagacacggcgataatttaaaacctgaaggtgaaatgacagttactagaa

SEQ ID NO: 15574 - DNA, 199 bp, Diabrotica virgifera
gagagagagagagagagagagagagagagagagagagagagagagagagagagagacagagagagagagagagagagagagacagaaaagagagagatagagagagagagatactgataacaacattacaattgtaatccgggtcaggtgtctaagttctactactaacactaataagatcgtaacaacaaaaattctt

SEQ ID NO: 15575 - DNA, 198 bp, Diabrotica virgifera
atactatcaatgccttaacggaattaagcagcacgaattttgtaacgaaggtcttctgtggaacgtacacattccaggatgcgatgaaaactctgattgttctcaactattagtttccactgaaaaaacagatgctccaactgcagcacccaccgaaagtacaactagtagcgtttgccaagaaggtgatcgaaatga

SEQ ID NO: 15576 - DNA, 199 bp, Diabrotica virgifera
tgacgttataacccattttgctacttcgaaacaacatagactagagttaatttataaacaggtttacaaaaaaaataaaaaaaataaaaaaaacaaaaccaaaaatcttctatgaaattgaagacttttaattagatggcatacctatctgaggagacaaaaccttgccgaccctgtccctaaagccacgagccgccac

SEQ ID NO: 15577 - DNA, 191 bp, Diabrotica virgifera
ataatatatatatgtatatatatacgtatatatgtgtatatatgtgtatatatgtgtatatatatatatatgtatatatatatatatataatgatgtaaaaaaattttaattttcaattttttaactgttttgtatggattgattgttatgtttaagcaaattgttagcaataaaatgattttaatcataa

SEQ ID NO: 15578 - DNA, 192 bp, Diabrotica virgifera
tgtattgagattttgctaagatttaagctgttatggtaatttattattgtacattatagcgggataatgtgctgagatttaagctagattatggtaatttattaatgtacattatagcgggggtaatgtgctgagattttgctgagatttaagctagattgtggtaatttattagtgtacattatagcgggg

SEQ ID NO: 15579 - DNA, 192 bp, Diabrotica virgifera
ctatattcactcgatcttccacttctgtttcaagcttttcgtaactagatagtagtgatgcctagatatttaaactccatcacttgttctattatctgaccttccagctccaagcttaaataatccaatcttattggatcatcatcatcaatggtgctacagccctatgaaagagcttcgaccttcccaagt

SEQ ID NO: 15580 - DNA, 188 bp, Diabrotica virgifera
cgattggtacgaagtaatcagagtaatcatagtagatataatagtcgttactcgctctgatacgaagtaatcagagtaatcaaagtagatacaatagtcgttactcgctctgatacgattggtacgaagtaacgaagtaatcagagtaatcaaagtagatacaatagtcgttactagctctaatacga

SEQ ID NO: 15581 - DNA, 185 bp, Diabrotica virgifera
gtatttaccaacagaagacaggattttgaggagcacttttttacacatcaactcacttcgactgtgacaatgacttatattatgttatgctttattatatttactttgagaatttaacaaaaaactgagaaaaaaagttgactaacgatccatccataaggatttttgaatttgagacgtattac

SEQ ID NO: 15582 - DNA, 180 bp, Diabrotica virgifera
caaaatgctgcaaacaaaacagtagatggagctaaaaatttagcacataatacagcccaaggaatagacaatgctctacacaaaacagcagaaggtgcacaaaatgcagcccataaaacagtagaaggagctcaaaatgtagcaaaagatattgataataaattaaaacatacggaggct

SEQ ID NO: 15583 - DNA, 182 bp, Diabrotica virgifera
  SmartBlast Evalue=1E-13; Info="Glutamate dehydrogenase, mitochondrial n=4 Tax=Apocrita RepID=E2A6U2_9HYME"
aaaagggacaatgggcagtatgaaatcattaaagggtacagagctcaacatagcacccacagaactccatgcaaagggggtatgcgtttctctatggacgtctccagagacgaagtcaaagctttggggattatatactaactaatattaaatctaacacaaattatcaaaatgttgaattt

SEQ ID NO: 15584 - DNA, 176 bp, Diabrotica virgifera
aaattattggcacaatgtaacctccaacttgatttatatagggaatatcaacttacatgataaaaatatagtattgtcttatgttcatctaatttaatcaaatggtaagtaaataattggagactgatattcttatgttcatctaatttaatcaaatggtaagtaaataattgtag

SEQ ID NO: 15585 - DNA, 171 bp, Diabrotica virgifera
attttagtacgaaaggaccaaatatataaataaattaaagatagaaaccaacctggctcacaccggtttaaactcagatcatgtaaatttataattggtgtagcagctatattattaagtctgttcgacttttaaaatagctgctacaccaattttaaactcagatcatgt

SEQ ID NO: 15586 - DNA, 171 bp, Diabrotica virgifera
acaagatatcgaactcaacctgttaccttttctagaaatccaggaagtggatgaagaaaacgtacaccgaagaagccatcccagagtcatctacctccaaatcagaactaagtcttctgatcaacagaaaattcgaagaattcaagaaaaccagagacatagactttattg

SEQ ID NO: 15587 - DNA, 170 bp, Diabrotica virgifera
ggtgccgtggccgttagtaggcatccgctatgagagaaattttttggaaaatacgaaaatatacattattttaagctattctcaaaaaaaaaattttgcggattatccattagttttcataataaaagactttgaaaattggattttatacacttttttagaccgccata

SEQ ID NO: 15588 - DNA, 164 bp, Diabrotica virgifera
ttttagtattacgtaagttaagtatttattgttttgaatttaggaactaagaagtagacttctcggataattatggacgtctgcttggtggaggaccaggtggtctaggacgtctgcttggtggaggacctggtggtctgggacgtctgcttggtggagggcct

SEQ ID NO: 15589 - DNA, 163 bp, Diabrotica virgifera
  SmartBlast Evalue=9E-20; Info=Cathepsin B-like proteinase n=1 Tax=Diabrotica virgifera virgifera RepID=Q70EW7_DIAVI
cccttgtctccccaatcttcattccatgaattagcagccaaccaatatgggactccattctctacaccccaacctaaaactttgacggaatggtatcctaaatcatctccagcgacatgttgataaacaccacttttataactccagaaatcactgtacaagt

SEQ ID NO: 15590 - DNA, 162 bp, Diabrotica virgifera
  SmartBlast Evalue=1E-17; Info=Ferritin n=1 Tax=Leptinotarsa decemlineata RepID=Q7Z161_LEPDE
aattggagacttttccagctaagtcccgttgtccatggtattgttcttccaagaagtcgccagtcaggtaatcaacaagatggtaatcgttgaagtttgagccgtcttcgcaaacttggatcacatctctgatctttctggtaactgaagcttccagtttaa

SEQ ID NO: 15591 - DNA, 162 bp, Diabrotica virgifera
  SmartBlast Evalue=2E-23; Info=Ribosomal protein L15 n=5 Tax= Ditrysia RepID=D1LYQ7_MANSE
tgtggtggattaagagtcctaaactcctactgggtagcccaagattcaacatacaaatattttgaaatcattttggtcgacccctcacataacgctattcgcaaggaccccaaaattaactggattgtcaactcagtacacaaacacagagaactccgtggc

SEQ ID NO: 15592 - DNA, 156 bp, Diabrotica virgifera
gtccaactgggaacacactgtatatttttgcaatatttatacttcattgtatgttaaaagagtggtttactattttgacacacaatgaaatataaataaatgcaaaaatatacaatgtatccataatttcgtcatatctggggacacactgtatat

SEQ ID NO: 15593 - DNA, 154 bp, Diabrotica virgifera
tttttagttaattaattgtttttaaattgttttataattgaaaacctattgtagtttaatatttagttaatctctgaatcgtattatattataggtattaaattttttaacagttctctttagtaatgtcattaagatacaataaaaattatga

SEQ ID NO: 15594 - DNA, 152 bp, Diabrotica virgifera
taacatttcatttttaaatatatctaatttttttaagaaataaattaaatttatttattaacaatatatttaattataaatatattgttaataaataaatttataattaaatatttttatattattaatattaaatatttttagggatgagc

SEQ ID NO: 15595 - DNA, 152 bp, Diabrotica virgifera
ttgaccgtgctaaggtagcataatcaaataccgcggccattcaaattaatcagtgggcaggcgagactttatattaaaaacatgtctttttgtataaagtctcgcctgcccaatgattatgctaccttagcacggtcaaaataccgcggcca

SEQ ID NO: 15596 - DNA, 152 bp, Diabrotica virgifera
atattcaagccaacattttattatgtaaaacctatgaggaactaaaggtacaatataatcaaatccttataaattttactaacaaaattagttaaaggaagattatgatcaattgaaaaagatagataagtactaagtaacaattgttagga

SEQ ID NO: 15597 - DNA, 150 bp, Diabrotica virgifera
tattatggtccttttcatgagcatttttcagtgcgtcacaaatgatagaaaaaaaggtaagtccgtgataatacacatttataacatttattctaacatgacattttagttaaatctgacagttgtcacattttatttgcaatttggcat

SEQ ID NO: 15598 - DNA, 147 bp, Diabrotica virgifera
  SmartBlast Evalue=1E-18; Info=60S ribosomal protein L10A n=4 Tax=Neoptera RepID=D1FPL3_CIMLE
aggtttgaacaaggctggtaaattccctggtcttctctcccaccaggaatccatgacacagaaaattgatgaagtaaaagcaacaatcaaattccaaatgaagaaggtactctgcctttctgttgctgttggtcatgtaggcatgaa

SEQ ID NO: 15599 - DNA, 146 bp, Diabrotica virgifera
atgccttggtcaaaaatggccggtccactgaatttgactttctctggctccactgtaggtttgacatgaacggggaatggactgttgggaatatttttgtcattgtaaagaatctgtgtctgtaagttagcgccttcattgggagg

SEQ ID NO: 15600 - DNA, 145 bp, Diabrotica virgifera
actaaactgcttaaaacaaatttcacacttgtaggtttttctccagtgtgcactctcaaatgtattttcaaatacctgcttcactaaattgcttaaaacaaatttcacacttgtgaggtttttctccagtgtgtattctcaaatg

SEQ ID NO: 15601 - DNA, 142 bp, Diabrotica virgifera
ccgatgccgcacaaggtagcgccaatgaagccaacgcagaaaacaatgctaatgcagacgctcaaaatgatgctgcacaagctaatgaataatggagctgctgcagaaaatagcggtaatgctgatgctgacccaaggtacc

SEQ ID NO: 15602 - DNA, 138 bp, Diabrotica virgifera
acaagcgctgataatagaaccacggacgaaggcataactgaaaaaaacacagatgtccccagtactacggacagtcaaaccgagacctcaactgatgacaatataactgataatgttaccacagaagaaaatatttct

SEQ ID NO: 15603 - DNA, 138 bp, Diabrotica virgifera
tgcaattgtcgacgttctagaagctaacaattgcatctatatcatctggtgatccatattgatgtcttgttgtaaggaaaagactctctagaaaaacaccagatgatattgttagcttctagaacgtcgacaattgca

SEQ ID NO: 15604 - DNA, 137 bp, Diabrotica virgifera
tttaataaaggaattcggcaacattttttcacctgtttattaaaaacatgtctttttgtattaaatataaagtctcgcctgcccaatgattatgctaccttagcacggtcaaaataccgcggccattcaaattaatc

SEQ ID NO: 15605 - DNA, 129 bp, Diabrotica virgifera
ataatgcaaaatcaggttgtgagggtggcggcagtgcttacatgtgcaacagtcaacaaccatgggcagtaaatagcactttggcatatggttttggtgccgcgtctttcagtaacggaattgatgtat

SEQ ID NO: 15606 - DNA, 127 bp, Diabrotica virgifera
ttctattatcagtgcttgtttcttccaaatcacctgttgtgctactagaaacgacacagatgtccccagtactacggacagtcaaaccgagacctcaactggtgacaatgtaactgataatgttacc

SEQ ID NO: 15607 - DNA, 129 bp, Diabrotica virgifera
aatttataaagacagtttttttttcatccaacccttcattccagctttcaataaaaaaactaatgaccgtgctaaggtagcataatcattagttttttcatccaacccttcattccagctttcaataaa

SEQ ID NO: 15608 - DNA, 126 bp, Diabrotica virgifera
gttttgttataaagcggtggaaaagtttttaaaagttaaggcaaacccataattatttgctcagtaatattattatgtatattatttctccttatagatgagggttctaatctataaggagtaata

SEQ ID NO: 15609 - DNA, 123 bp, Diabrotica virgifera
ggtttgacaattttataacaccgaaggtgtagattatttcgaaggtacaataaggtagaattatttcgacggtatgtttccaaaaagatatattcttctaaaaaatgcaaatcccaaaattta

SEQ ID NO: 15610 - DNA, 120 bp, Diabrotica virgifera
ttttattttattttaaatttaatttaaaatttattttttttagttaaaagttaaagtaaaaatttttattttaattgtattagtttaatttagttatttgttgtagtagtaattatttta

SEQ ID NO: 15611 - DNA, 120 bp, Diabrotica virgifera
ggatgctgtagctgtaccgaatataaaatatcctggaaacgttttattgttcagttcctctccgcatgttgcagatatcacaagaacacacaacacccaaactctatgccgaaacattgt

SEQ ID NO: 15612 - DNA, 117 bp, Diabrotica virgifera
tatttaaatatgaaatttaatcctaatttattaaattaatttaataaatttcatatttaaatatgttattattattttatatattattattttattttataattttattaaatataa

SEQ ID NO: 15613 - DNA, 118 bp, Diabrotica virgifera
attcttccagtccatactggttgtttcatggttatcttgatggttcctgagtagtgctgtgaaaggaaccatcaagataaccatgaaacaaccagtatggactggaagaatcagcgca

SEQ ID NO: 15614 - DNA, 118 bp, Diabrotica virgifera
caattacatatcttggattaaaggaatagtcgatgatttataaaatatagaatcgatgagtttgttgatacagatgatttgtaatttatttttaattatataaaatatattgataaac

SEQ ID NO: 15615 - DNA, 118 bp, Diabrotica virgifera
ttagtattacgtaagttaagttataattgttttcaatttaggaactaagaagttgacttctcgggttatcatggtcgtctgcttggtggaggacctggtggtctaggacgtctgcttg

SEQ ID NO: 15616 - DNA, 115 bp, Diabrotica virgifera
cttactagttcttacctaatttctttgtttctacttgtagtaggtaactacgtttgtattttttgttggtattggtcgtagtttgtacctttcgtagggtattccggttggttac

SEQ ID NO: 15617 - DNA, 109 bp, Diabrotica virgifera
gacctggtggtctagggcgtctacttggtggaggacctggtggtcttggacgtctgcttggtggaggacctggtggtctaggtcctccaccaagcagacgtcctagacc

SEQ ID NO: 15618 - DNA, 105 bp, Diabrotica virgifera
attattaattaatataataatataaaaaaagttaaatttatttatttaattggggtgattaaaaaataaatttaactttttttatattattatattaattaataa

SEQ ID NO: 15619 - DNA, 104 bp, Diabrotica virgifera
gtctgttgttgttcgtacttaatggtgtaaatgaagcattttactccctacacaattagtcaaaaatgagaagaaagtgtaaaaaataaagtgatatgttacct

SEQ ID NO: 15620 - DNA, 104 bp, Diabrotica virgifera
gcattctagcattcagtgctctttttggtagcctatcctctcccattcttatcacatgtccggcccattgcaatctttgtattctaatgaagtctgacaggggt

SEQ ID NO: 15621 - DNA, 104 bp, Diabrotica virgifera
aataaaattctttataaattaaataaagacagtttttttttcatccaacccttcattccagctttcaataaaaaaactaatgaccgtgctaaggtagcataatc

SEQ ID NO: 15622 - DNA, 103 bp, Diabrotica virgifera
gtagactaaaagcttgaaatagagaccattgcctccaaaaaagtgagcgatagtgtaacaaacttttagaaaaaaatattaaaaacggaccagagttgtagcg

SEQ ID NO: 15623 - DNA, 103 bp, Diabrotica virgifera
ttgggactggaatcaatatattccctcagtttgttgagatcttccagggctgaatcccagttttggtacagaatttctgaagcgaattttccccacaaggcac

SEQ ID NO: 15624 - DNA, 99 bp, Diabrotica virgifera
aaacttttgagtacgttccaattgaaattattattgtggcaccattagttaaacacaatgtttctaaaacttttttgcctcttagtacttttttgataa
